United States Patent Application Publication US 2006/0257851 A1 - sequence listing, part 13

SEQ ID NO: 419303 - RNA, 32 nt, Homo Sapiens
guggacaugagagaauucacacaggggaaaaa

SEQ ID NO: 419304 - RNA, 32 nt, Homo Sapiens
gcucuucugugacacuugccaccaccaccuuc

SEQ ID NO: 419305 - RNA, 32 nt, Homo Sapiens
cugcaccaccccagcccuuccccacagcccaa

SEQ ID NO: 419306 - RNA, 32 nt, Homo Sapiens
gggaaggccgcagucgcggaggcagcggcgcg

SEQ ID NO: 419307 - RNA, 32 nt, Homo Sapiens
auccuguuaguagagguuuucuagcuucuacu

SEQ ID NO: 419308 - RNA, 30 nt, Homo Sapiens
cugugguguuucugggcagaagcuuaucuu

SEQ ID NO: 419309 - RNA, 32 nt, Homo Sapiens
auuuauguuguccugugccauaaagugauaua

SEQ ID NO: 419310 - RNA, 32 nt, Homo Sapiens
cucuuuguacuccucccuguacaacaucacag

SEQ ID NO: 419311 - RNA, 32 nt, Homo Sapiens
aaacaaugucucaaccugauaauuuccuuagc

SEQ ID NO: 419312 - RNA, 32 nt, Homo Sapiens
aaacggaggaggaggaggguuugcuugagguu

SEQ ID NO: 419313 - RNA, 32 nt, Homo Sapiens
ccaacacacacacacacacacacacacacaca

SEQ ID NO: 419314 - RNA, 32 nt, Homo Sapiens
caaaaacggauaugauaaaccuaucucagugg

SEQ ID NO: 419315 - RNA, 32 nt, Homo Sapiens
gccuguaaaaauucuuuaaaauucaagagggg

SEQ ID NO: 419316 - RNA, 32 nt, Homo Sapiens
uccuguaccuuuuuuuuuuuuaaccaaaauaa

SEQ ID NO: 419317 - RNA, 32 nt, Homo Sapiens
caauuuaaauaaaacuauacguauaaaacuuu

SEQ ID NO: 419318 - RNA, 32 nt, Homo Sapiens
uuccuuugaaacaaaaugcuguucaguuagua

SEQ ID NO: 419319 - RNA, 32 nt, Homo Sapiens
gcgacacgucccgucccacagugcaagacccc

SEQ ID NO: 419320 - RNA, 29 nt, Homo Sapiens
ggaguuuggagacagaggagauccuaacc

SEQ ID NO: 419321 - RNA, 32 nt, Homo Sapiens
cauccccacccgccccucucccggcccugcuu

SEQ ID NO: 419322 - RNA, 32 nt, Homo Sapiens
uuuuauuuaacccuauauauuaugacuuacuu

SEQ ID NO: 419323 - RNA, 30 nt, Homo Sapiens
uaaauauaucaccacuauugcuggagucau

SEQ ID NO: 419324 - RNA, 32 nt, Homo Sapiens
ggcggagaggccgcgugugggagcguguugaa

SEQ ID NO: 419325 - RNA, 32 nt, Homo Sapiens
ggacacuucagccccagggaccugggcagcac

SEQ ID NO: 419326 - RNA, 32 nt, Homo Sapiens
uccuuccuccguagaagagggugcugguccug

SEQ ID NO: 419327 - RNA, 32 nt, Homo Sapiens
uacuucuagauguuuugguuauacagcuucau

SEQ ID NO: 419328 - RNA, 32 nt, Homo Sapiens
gggucccgcuccccgccccccgcgguaugucu

SEQ ID NO: 419329 - RNA, 32 nt, Homo Sapiens
agcugguuccucucccuugguuauggccgcua

SEQ ID NO: 419330 - RNA, 32 nt, Homo Sapiens
aaugguucucuucccuuuuccauccuccaaac

SEQ ID NO: 419331 - RNA, 32 nt, Homo Sapiens
ggugccugccagcacgcccagcuaauuuuugu

SEQ ID NO: 419332 - RNA, 32 nt, Homo Sapiens
augaauaauaauaaauauguacugcuggcaug

SEQ ID NO: 419333 - RNA, 32 nt, Homo Sapiens
auaaauauaggcaugcagguguccuuuugaug

SEQ ID NO: 419334 - RNA, 32 nt, Homo Sapiens
cacugcacuccagcuugggugagagugggacu

SEQ ID NO: 419335 - RNA, 32 nt, Homo Sapiens
uuuucuuacugauuuuuaaguuauuuuuacau

SEQ ID NO: 419336 - RNA, 32 nt, Homo Sapiens
gcacaucaacugaucucauuucuagagagccc

SEQ ID NO: 419337 - RNA, 32 nt, Homo Sapiens
agucugaggauaugaaaaauagagcugaugcc

SEQ ID NO: 419338 - RNA, 32 nt, Homo Sapiens
acaauguccugccuuuggaaaagcagaacaaa

SEQ ID NO: 419339 - RNA, 28 nt, Homo Sapiens
cuaauguugauuaauaugugaaaagaaa

SEQ ID NO: 419340 - RNA, 32 nt, Homo Sapiens
gcuucuuaaguggaaggaaaagagugcugaga

SEQ ID NO: 419341 - RNA, 32 nt, Homo Sapiens
cgugucaguaauuuauaugguguuaaaaugug

SEQ ID NO: 419342 - RNA, 32 nt, Homo Sapiens
aggcucugcuaaggacagagacaccccauugu

SEQ ID NO: 419343 - RNA, 32 nt, Homo Sapiens
augggccaguguuccugcauguugggggaaag

SEQ ID NO: 419344 - RNA, 32 nt, Homo Sapiens
auuuggcccucaaggaccguguugcccuccug

SEQ ID NO: 419345 - RNA, 32 nt, Homo Sapiens
cgccgcgcagcccgcgcacgcccggauggcuc

SEQ ID NO: 419346 - RNA, 32 nt, Homo Sapiens
cccggaggcgcccuuucgaccuggaggccggg

SEQ ID NO: 419347 - RNA, 32 nt, Homo Sapiens
aagauggaaaagaucucagaugcugugacccc

SEQ ID NO: 419348 - RNA, 32 nt, Homo Sapiens
ugcuggugcacagccacuccccggcaugagac

SEQ ID NO: 419349 - RNA, 32 nt, Homo Sapiens
gaaugucuugacuucccuuccauuuuugucag

SEQ ID NO: 419350 - RNA, 31 nt, Homo Sapiens
caggagaaucacuugaaccagggaggcagag

SEQ ID NO: 419351 - RNA, 32 nt, Homo Sapiens
auucuauguguuuugucuuuuucuuaaauauu

SEQ ID NO: 419352 - RNA, 32 nt, Homo Sapiens
uuucccuggugccaauuucuuuuccuccuggg

SEQ ID NO: 419353 - RNA, 32 nt, Homo Sapiens
gaacuauaauaaauaucuguagcuuaaaaagu

SEQ ID NO: 419354 - RNA, 32 nt, Homo Sapiens
uauuuucuuuuuccuuauauagaguaaaauaa

SEQ ID NO: 419355 - RNA, 32 nt, Homo Sapiens
cuuuugaauauggaaucuuacuauuugaauag

SEQ ID NO: 419356 - RNA, 32 nt, Homo Sapiens
gccggcccggcggcugcugcugcugcugacgc

SEQ ID NO: 419357 - RNA, 32 nt, Homo Sapiens
aguagcgcagauuucugcccagugucuauuuu

SEQ ID NO: 419358 - RNA, 32 nt, Homo Sapiens
accugcaccugcguccuccccuccccggcccu

SEQ ID NO: 419359 - RNA, 32 nt, Homo Sapiens
agaauucugugcaaacauaucaucucuucaaa

SEQ ID NO: 419360 - RNA, 32 nt, Homo Sapiens
ucugcucaguguucugguagcagagcucagag

SEQ ID NO: 419361 - RNA, 32 nt, Homo Sapiens
uauuuuauuucugauguuuuauuugcacucgu

SEQ ID NO: 419362 - RNA, 32 nt, Homo Sapiens
acaccgggugaccccuuagggcacccaggcaa

SEQ ID NO: 419363 - RNA, 32 nt, Homo Sapiens
ucaacggcgagccagagcuggaccucaccagc

SEQ ID NO: 419364 - RNA, 32 nt, Homo Sapiens
ucucugugacucuacaccaccaucaccuccuc

SEQ ID NO: 419365 - RNA, 32 nt, Homo Sapiens
gagaggaggaggaggcugaguuugggguauug

SEQ ID NO: 419366 - RNA, 32 nt, Homo Sapiens
gguggagcguggccauggauaaucgggcuucc

SEQ ID NO: 419367 - RNA, 32 nt, Homo Sapiens
gcuucgucucccuccgccgcuaucggggccua

SEQ ID NO: 419368 - RNA, 32 nt, Homo Sapiens
aaacaagauggcaacauauaugcuuucagggu

SEQ ID NO: 419369 - RNA, 30 nt, Homo Sapiens
ucuuuuuagccccugggggaaaucagcuua

SEQ ID NO: 419370 - RNA, 32 nt, Homo Sapiens
gacuauaagaagaagggcagauaauauaugaa

SEQ ID NO: 419371 - RNA, 32 nt, Homo Sapiens
uuuuaaccuugaugugggauaaaggcuucgug

SEQ ID NO: 419372 - RNA, 32 nt, Homo Sapiens
accaguuucuguuccuugugggaugcugcucu

SEQ ID NO: 419373 - RNA, 29 nt, Homo Sapiens
auccccauguguuucagguggaacaggag

SEQ ID NO: 419374 - RNA, 32 nt, Homo Sapiens
acauguuuuuagccucaccagaagucuuucau

SEQ ID NO: 419375 - RNA, 32 nt, Homo Sapiens
cagagccucaugggcuggcugcugcagggugu

SEQ ID NO: 419376 - RNA, 32 nt, Homo Sapiens
ucagcaguauucuauuugguuagaaggguuac

SEQ ID NO: 419377 - RNA, 32 nt, Homo Sapiens
gaagcccaagcagcugcggccgcaguggaggc

SEQ ID NO: 419378 - RNA, 32 nt, Homo Sapiens
guauaugcauuuuuuaugauuguugugugacu

SEQ ID NO: 419379 - RNA, 32 nt, Homo Sapiens
cuuuucccaccuuaggcuuuggcacugauaga

SEQ ID NO: 419380 - RNA, 32 nt, Homo Sapiens
uccaggggguggaacccaauguuuacauucuc

SEQ ID NO: 419381 - RNA, 32 nt, Homo Sapiens
gcuauuuuuuaaaaacaucuacuacacucuaa

SEQ ID NO: 419382 - RNA, 32 nt, Homo Sapiens
cacccccaggcuuguucuuguuuuacuguauu

SEQ ID NO: 419383 - RNA, 32 nt, Homo Sapiens
aauuuggaaugcugaauagaaaauuauagauu

SEQ ID NO: 419384 - RNA, 32 nt, Homo Sapiens
acagaguguuccaggaggagguuugagcugag

SEQ ID NO: 419385 - RNA, 32 nt, Homo Sapiens
agagaauaguaagagaagguucauauuacuca

SEQ ID NO: 419386 - RNA, 29 nt, Homo Sapiens
caggaagcuuccaaucauggcagaaaaga

SEQ ID NO: 419387 - RNA, 32 nt, Homo Sapiens
ggagagaggucuugaggggugggagcaggugu

SEQ ID NO: 419388 - RNA, 32 nt, Homo Sapiens
ggcaacuugguaguuguuuuuguugcuaauau

SEQ ID NO: 419389 - RNA, 32 nt, Homo Sapiens
cuucccggugccuccgccgggcgcccagggug

SEQ ID NO: 419390 - RNA, 32 nt, Homo Sapiens
ugugaaaaacaguuugugaaggucagagaugc

SEQ ID NO: 419391 - RNA, 32 nt, Homo Sapiens
ccacucccugccagccccugcccgcuggacuc

SEQ ID NO: 419392 - RNA, 32 nt, Homo Sapiens
gugguccggaagcugcaggggaagcggcuggg

SEQ ID NO: 419393 - RNA, 32 nt, Homo Sapiens
uacagcauuuuuacuguguaugauaugguguc

SEQ ID NO: 419394 - RNA, 32 nt, Homo Sapiens
auuuucuuuucuaaaugaaacuccauguagca

SEQ ID NO: 419395 - RNA, 32 nt, Homo Sapiens
caaaggagggaaaacuuucuacgaaucuaaga

SEQ ID NO: 419396 - RNA, 32 nt, Homo Sapiens
caucagacaguaggaaauauuuguaauuaaaa

SEQ ID NO: 419397 - RNA, 32 nt, Homo Sapiens
cuaggcgggaagcucgagcggcggcgccaugg

SEQ ID NO: 419398 - RNA, 32 nt, Homo Sapiens
uagggaacaaggaaacuuacugggaaguucaa

SEQ ID NO: 419399 - RNA, 32 nt, Homo Sapiens
uauagcuuaaccuggauuaaacacgagcaagc

SEQ ID NO: 419400 - RNA, 32 nt, Homo Sapiens
cucaguuugugugucuuaauuauuauuugugu

SEQ ID NO: 419401 - RNA, 32 nt, Homo Sapiens
ugaucauugcgagcaugcgcugauuggacuga

SEQ ID NO: 419402 - RNA, 32 nt, Homo Sapiens
cccugcugccagcccuugagcagcccgugugg

SEQ ID NO: 419403 - RNA, 32 nt, Homo Sapiens
ccgucuggucuuugacaagaccaacgaaaaca

SEQ ID NO: 419404 - RNA, 32 nt, Homo Sapiens
ugggggagggcccgaaauaucuauguuuuacc

SEQ ID NO: 419405 - RNA, 32 nt, Homo Sapiens
uugguuuuuuaaauuuugccaucuguuuucuu

SEQ ID NO: 419406 - RNA, 32 nt, Homo Sapiens
uauuuauuuauuuuucgagacggagucucgcu

SEQ ID NO: 419407 - RNA, 32 nt, Homo Sapiens
cggcggcggcagccaggggagccccgguggca

SEQ ID NO: 419408 - RNA, 32 nt, Homo Sapiens
uuauuuacaaugaauccuuccaaacuaaaaaa

SEQ ID NO: 419409 - RNA, 32 nt, Homo Sapiens
aagugaaacugggcuuuaaaaaggauggauuu

SEQ ID NO: 419410 - RNA, 32 nt, Homo Sapiens
gaaccagugaaaacuacauuugccauuccuga

SEQ ID NO: 419411 - RNA, 32 nt, Homo Sapiens
ugcuuugacaacaauggaaauagagaaguggc

SEQ ID NO: 419412 - RNA, 32 nt, Homo Sapiens
gaaggaaauuguucuuuuugaguuaucuacuu

SEQ ID NO: 419413 - RNA, 32 nt, Homo Sapiens
ccauuggccucccgauggugcccuaguggaau

SEQ ID NO: 419414 - RNA, 32 nt, Homo Sapiens
gacaaccuuuuguuuccaaccaacguguaucu

SEQ ID NO: 419415 - RNA, 32 nt, Homo Sapiens
ggcuaguucauucccuccccagccaggugcag

SEQ ID NO: 419416 - RNA, 32 nt, Homo Sapiens
uguugaacuguuugccuuguauggaacauuuu

SEQ ID NO: 419417 - RNA, 32 nt, Homo Sapiens
uuaaacauagucagcucugaucacauccccug

SEQ ID NO: 419418 - RNA, 32 nt, Homo Sapiens
cgccgaggucucggggaggcccggacgcgccg

SEQ ID NO: 419419 - RNA, 31 nt, Homo Sapiens
gccggccgaaucugcaggccccgcgcgccag

SEQ ID NO: 419420 - RNA, 32 nt, Homo Sapiens
ucccagaaccagugggcgagggggcgacuuac

SEQ ID NO: 419421 - RNA, 32 nt, Homo Sapiens
uggggccuuuaagcccucuggaagcuuccauu

SEQ ID NO: 419422 - RNA, 32 nt, Homo Sapiens
cucagugcuuugcauguauuagcucacugaau

SEQ ID NO: 419423 - RNA, 32 nt, Homo Sapiens
aauugaugauaaaauuuguaucucauuaauuu

SEQ ID NO: 419424 - RNA, 32 nt, Homo Sapiens
uugcacuuucccucuggcuucccucccagccu

SEQ ID NO: 419425 - RNA, 32 nt, Homo Sapiens
ugagaagacuuggcccagagaagugcacagac

SEQ ID NO: 419426 - RNA, 32 nt, Homo Sapiens
uuaaucugccagcagauaccaucuacacuaac

SEQ ID NO: 419427 - RNA, 32 nt, Homo Sapiens
ugagaagacugagacucagugagggcccagca

SEQ ID NO: 419428 - RNA, 32 nt, Homo Sapiens
ucccgaaggucccgcaggaacuguggcaaugg

SEQ ID NO: 419429 - RNA, 32 nt, Homo Sapiens
cuaguaaguauuuaguuauaucacuugcauau

SEQ ID NO: 419430 - RNA, 32 nt, Homo Sapiens
uucggaauauauauccacacaugaauuuuaga

SEQ ID NO: 419431 - RNA, 32 nt, Homo Sapiens
gaaagguucuucauugcuuuucuguucacagu

SEQ ID NO: 419432 - RNA, 32 nt, Homo Sapiens
uuugcucugccagcagcugucggugccgcgcu

SEQ ID NO: 419433 - RNA, 29 nt, Homo Sapiens
gcuaccuaaaguuuguauugauucucuca

SEQ ID NO: 419434 - RNA, 32 nt, Homo Sapiens
cuuuaauagaaaguaacauaaagcuaguauuc

SEQ ID NO: 419435 - RNA, 32 nt, Homo Sapiens
aagaaaacuguaaaagcagagauuuuaguaau

SEQ ID NO: 419436 - RNA, 32 nt, Homo Sapiens
uuuucugaaacauucagagcauccucuacccc

SEQ ID NO: 419437 - RNA, 32 nt, Homo Sapiens
uuaaaccuaagccccacaaacuugacaccuga

SEQ ID NO: 419438 - RNA, 32 nt, Homo Sapiens
uuuggcaggacacguggggagaugggcuggga

SEQ ID NO: 419439 - RNA, 32 nt, Homo Sapiens
agaguuccaagcccacggccccggucgcggcc

SEQ ID NO: 419440 - RNA, 32 nt, Homo Sapiens
cucucccccaugcauacucauccaccucccuc

SEQ ID NO: 419441 - RNA, 32 nt, Homo Sapiens
ucauauguuugauuuuuaaaucccaccuccuc

SEQ ID NO: 419442 - RNA, 32 nt, Homo Sapiens
gcccggcgccucagcugcccccggccauggcg

SEQ ID NO: 419443 - RNA, 32 nt, Homo Sapiens
cuauggaauguuucugcaacccuaaggcacag

SEQ ID NO: 419444 - RNA, 32 nt, Homo Sapiens
cucuaggacgagcucugugucccccacaccac

SEQ ID NO: 419445 - RNA, 32 nt, Homo Sapiens
gaaagaaacuuucaccugagcuucaccugagg

SEQ ID NO: 419446 - RNA, 32 nt, Homo Sapiens
uauuuuuuauacauuguaaaacauagacguuu

SEQ ID NO: 419447 - RNA, 32 nt, Homo Sapiens
aggaaugccaccugccacaguugauggugaga

SEQ ID NO: 419448 - RNA, 32 nt, Homo Sapiens
gccgcgcggccugaagcgcccgcgauggcgag

SEQ ID NO: 419449 - RNA, 32 nt, Homo Sapiens
uggcaaguccuuaagcugggacggccagcgcc

SEQ ID NO: 419450 - RNA, 32 nt, Homo Sapiens
gaaaccucauuucuacuaaaaauacaaaaauu

SEQ ID NO: 419451 - RNA, 32 nt, Homo Sapiens
ccuccucuuucccacacagucccucccgcccu

SEQ ID NO: 419452 - RNA, 32 nt, Homo Sapiens
gggagaaaauagagacccauccccaaauacca

SEQ ID NO: 419453 - RNA, 32 nt, Homo Sapiens
ugggagcacgggugaggugccucccuucucug

SEQ ID NO: 419454 - RNA, 32 nt, Homo Sapiens
cagaguucccagcagacagccauggcucuucc

SEQ ID NO: 419455 - RNA, 32 nt, Homo Sapiens
gaaaggccccacugauaagguaacauuugagc

SEQ ID NO: 419456 - RNA, 32 nt, Homo Sapiens
aggcggcggcggcggccgagggggccggucuu

SEQ ID NO: 419457 - RNA, 32 nt, Homo Sapiens
gcugauuauugcugccuauuuuagaacauucu

SEQ ID NO: 419458 - RNA, 32 nt, Homo Sapiens
gccuuccucuuccaccaccaccaccggcugcc

SEQ ID NO: 419459 - RNA, 32 nt, Homo Sapiens
gccccucaagcaccggccccgccccauaggcc

SEQ ID NO: 419460 - RNA, 32 nt, Homo Sapiens
caagcaauacucagaaauucaggcugugaggg

SEQ ID NO: 419461 - RNA, 32 nt, Homo Sapiens
uaggaauucguaaucauccccauccuccagag

SEQ ID NO: 419462 - RNA, 32 nt, Homo Sapiens
ugauuucuguuguuuguauucuguacuuuaga

SEQ ID NO: 419463 - RNA, 32 nt, Homo Sapiens
cuccuguacgaaccccuccccuccccccugua

SEQ ID NO: 419464 - RNA, 32 nt, Homo Sapiens
ucuuaggauaguguuugauauaucuaagaaag

SEQ ID NO: 419465 - RNA, 31 nt, Homo Sapiens
gggaagucugaagcucagagagccugggcca

SEQ ID NO: 419466 - RNA, 32 nt, Homo Sapiens
ccuuuauuuguaauauaugugcucuuaaaagc

SEQ ID NO: 419467 - RNA, 32 nt, Homo Sapiens
cuccagggagugaugggaauccugucauucuu

SEQ ID NO: 419468 - RNA, 32 nt, Homo Sapiens
aaggagguaagagauacuauuuuugcugagca

SEQ ID NO: 419469 - RNA, 32 nt, Homo Sapiens
cugaggucgggaguuugagaccagccugacca

SEQ ID NO: 419470 - RNA, 32 nt, Homo Sapiens
gcccugccguuggggaaugaaugccacacggg

SEQ ID NO: 419471 - RNA, 32 nt, Homo Sapiens
auacgagauuugcaggggaaacaucaguaaac

SEQ ID NO: 419472 - RNA, 32 nt, Homo Sapiens
gauuuugccauguuggccaggcuggucucgaa

SEQ ID NO: 419473 - RNA, 32 nt, Homo Sapiens
ugauauuaaaaauuauuagagauaauuuacuu

SEQ ID NO: 419474 - RNA, 32 nt, Homo Sapiens
gacccauggcucucuguguucuucccaguggg

SEQ ID NO: 419475 - RNA, 32 nt, Homo Sapiens
ggcccagggagcaaugggagggggcuccaugg

SEQ ID NO: 419476 - RNA, 32 nt, Homo Sapiens
cucaaguuucccguuggcgccgcggcccgggc

SEQ ID NO: 419477 - RNA, 30 nt, Homo Sapiens
uaaaagaaguggccugcagaaguuuaauaa

SEQ ID NO: 419478 - RNA, 32 nt, Homo Sapiens
gccuuucuagccgcugucccaaggguuggucu

SEQ ID NO: 419479 - RNA, 32 nt, Homo Sapiens
caccuggacuuccagucuggcuccaaaccuca

SEQ ID NO: 419480 - RNA, 32 nt, Homo Sapiens
cucuaacagaaucuucucuccuggucuccuug

SEQ ID NO: 419481 - RNA, 32 nt, Homo Sapiens
gggaaaugguucuccuuucccucucaauaaau

SEQ ID NO: 419482 - RNA, 32 nt, Homo Sapiens
uacaguaaugaaauguuuacuaaguggacugg

SEQ ID NO: 419483 - RNA, 32 nt, Homo Sapiens
uccucccagagcagccggcagcuaccuggacc

SEQ ID NO: 419484 - RNA, 32 nt, Homo Sapiens
ugagcugaggccccuuuccuccuccuugaaaa

SEQ ID NO: 419485 - RNA, 32 nt, Homo Sapiens
cucuuggccucuaauuuuuuuaucuuucgugu

SEQ ID NO: 419486 - RNA, 32 nt, Homo Sapiens
gaacagauucagaugagcauuuuccuuauaca

SEQ ID NO: 419487 - RNA, 32 nt, Homo Sapiens
ugcggcaggaccagccugacgcacacgcuccu

SEQ ID NO: 419488 - RNA, 32 nt, Homo Sapiens
agcggcccggccccggcccccugcucguuggc

SEQ ID NO: 419489 - RNA, 32 nt, Homo Sapiens
uuguauggauguaaguuuuucuuuugucuaaa

SEQ ID NO: 419490 - RNA, 32 nt, Homo Sapiens
uguucgccaugcccagccagugccaagugccc

SEQ ID NO: 419491 - RNA, 32 nt, Homo Sapiens
ccagugugugagccggccggccgcggcaagcc

SEQ ID NO: 419492 - RNA, 32 nt, Homo Sapiens
uuugggguguuguagaagggccuuaaaaagaa

SEQ ID NO: 419493 - RNA, 32 nt, Homo Sapiens
uguccauuauaaucuuucucuuucucuuugaa

SEQ ID NO: 419494 - RNA, 32 nt, Homo Sapiens
uauuagugaaagaugguggaucgcuuggcaaa

SEQ ID NO: 419495 - RNA, 32 nt, Homo Sapiens
gcauuuuuauuugaauaugaugaguauauuuu

SEQ ID NO: 419496 - RNA, 32 nt, Homo Sapiens
gcuugguucuuacuguguuuguguauuuuaaa

SEQ ID NO: 419497 - RNA, 32 nt, Homo Sapiens
aauguuguugguuuuuauuaauguuauuuuua

SEQ ID NO: 419498 - RNA, 32 nt, Homo Sapiens
ccacuacggaccgugccuucuccaccuucccc

SEQ ID NO: 419499 - RNA, 32 nt, Homo Sapiens
cuuuggcccccucccucccuauaaggcugugg

SEQ ID NO: 419500 - RNA, 32 nt, Homo Sapiens
cugagcugcucacccuuuauccacuuugcuua

SEQ ID NO: 419501 - RNA, 32 nt, Homo Sapiens
uuccccuuugaggaggugcugcuguuugcuuu

SEQ ID NO: 419502 - RNA, 32 nt, Homo Sapiens
uggcucaccagcgucccggcgccuccguuagg

SEQ ID NO: 419503 - RNA, 32 nt, Homo Sapiens
ccaguggaagagcugaguccccgccccaguca

SEQ ID NO: 419504 - RNA, 29 nt, Homo Sapiens
guauacauauguacuauagacauguuaau

SEQ ID NO: 419505 - RNA, 32 nt, Homo Sapiens
augcacagggcugcaacaccacgacuucugcc

SEQ ID NO: 419506 - RNA, 32 nt, Homo Sapiens
ugcgccaguacgccuggcuaguuuuaguauuu

SEQ ID NO: 419507 - RNA, 32 nt, Homo Sapiens
ucuggcccucccuccucccacccacuggcucc

SEQ ID NO: 419508 - RNA, 32 nt, Homo Sapiens
auguaugucuuuucuuuuugaaaauguuuuuc

SEQ ID NO: 419509 - RNA, 32 nt, Homo Sapiens
accuggggaggaggcgggagagggagcugcca

SEQ ID NO: 419510 - RNA, 32 nt, Homo Sapiens
ccuggaauugugggugaggcugucuggcauag

SEQ ID NO: 419511 - RNA, 32 nt, Homo Sapiens
uuacuuaguuuaugcugauguagggcagguga

SEQ ID NO: 419512 - RNA, 32 nt, Homo Sapiens
ugacuguuucuguagagcacuaucucgggcag

SEQ ID NO: 419513 - RNA, 32 nt, Homo Sapiens
cccaugauaaugacauuaauccauucaagaag

SEQ ID NO: 419514 - RNA, 32 nt, Homo Sapiens
ggcccgcggccccggcggccaaucgggacuau

SEQ ID NO: 419515 - RNA, 32 nt, Homo Sapiens
aggaguguccccagccccaugaccuuccuucu

SEQ ID NO: 419516 - RNA, 32 nt, Homo Sapiens
caugggaacgcccacaugggaccgcccacaug

SEQ ID NO: 419517 - RNA, 32 nt, Homo Sapiens
cagagcccauaguggauagucucuuccaacag

SEQ ID NO: 419518 - RNA, 32 nt, Homo Sapiens
ucccucgccuccccuuguggacgggggucuug

SEQ ID NO: 419519 - RNA, 32 nt, Homo Sapiens
ucagcgcgcgccccgauggucaccugcgccca

SEQ ID NO: 419520 - RNA, 32 nt, Homo Sapiens
acccuaccccaccacaccccaucccagaggcc

SEQ ID NO: 419521 - RNA, 32 nt, Homo Sapiens
uuguuucuuuccuggaggagaagagagcuccc

SEQ ID NO: 419522 - RNA, 32 nt, Homo Sapiens
ugaacucguuugcuccuaaaucuuguuaauuc

SEQ ID NO: 419523 - RNA, 32 nt, Homo Sapiens
cccucagugaaacaaccuccucccuuagcuuu

SEQ ID NO: 419524 - RNA, 32 nt, Homo Sapiens
gcaggggagagccucaccuaggccaaucccca

SEQ ID NO: 419525 - RNA, 32 nt, Homo Sapiens
aaguggcuugucugcagucacccagggcgucc

SEQ ID NO: 419526 - RNA, 32 nt, Homo Sapiens
gaucgcucaacccuuaguaaacacgagaggac

SEQ ID NO: 419527 - RNA, 32 nt, Homo Sapiens
auguccuugacaagggagcuucuuuaugugua

SEQ ID NO: 419528 - RNA, 32 nt, Homo Sapiens
guguucggaguuucuuccuucugguggguucg

SEQ ID NO: 419529 - RNA, 32 nt, Homo Sapiens
uuagcugacuugagaagcugugauggccaagc

SEQ ID NO: 419530 - RNA, 32 nt, Homo Sapiens
gaauauaaaaagacaugagaugguagccaaac

SEQ ID NO: 419531 - RNA, 32 nt, Homo Sapiens
aacugaccuguacuccacgaggcccuguggga

SEQ ID NO: 419532 - RNA, 32 nt, Homo Sapiens
accuccugccagcaccuugccuggccccuccc

SEQ ID NO: 419533 - RNA, 30 nt, Homo Sapiens
cuuccgccggccccgccgccggccaugcau

SEQ ID NO: 419534 - RNA, 32 nt, Homo Sapiens
cuaccccauuuuccuuuccacaaucagagcca

SEQ ID NO: 419535 - RNA, 32 nt, Homo Sapiens
uccuggggagaugcaggcucuguucagaugcu

SEQ ID NO: 419536 - RNA, 32 nt, Homo Sapiens
uauuacucauacauuugcucaauuuguacaga

SEQ ID NO: 419537 - RNA, 32 nt, Homo Sapiens
aaaagcaaguuuaaaacaaaaauuaggagguu

SEQ ID NO: 419538 - RNA, 32 nt, Homo Sapiens
uugugccaauaagagaaguaaauaucaaacau

SEQ ID NO: 419539 - RNA, 32 nt, Homo Sapiens
ugacucgauuaaaaagggagugagccauaacu

SEQ ID NO: 419540 - RNA, 32 nt, Homo Sapiens
gccucugggaccagcuuucucuccuggacacc

SEQ ID NO: 419541 - RNA, 32 nt, Homo Sapiens
agagccugguguaguuuuuaauuuugaguuuu

SEQ ID NO: 419542 - RNA, 32 nt, Homo Sapiens
cgaaauuguguuaugacugauagccuucagcu

SEQ ID NO: 419543 - RNA, 32 nt, Homo Sapiens
ucacuguuuuaagaucuugacucuucauuugu

SEQ ID NO: 419544 - RNA, 30 nt, Homo Sapiens
ggccacuaggggcgcgcggcacccggagcc

SEQ ID NO: 419545 - RNA, 32 nt, Homo Sapiens
acccauuuuuuaaaaugacacuuaauguuauu

SEQ ID NO: 419546 - RNA, 32 nt, Homo Sapiens
ucuggaacagcacguggugggguccugcuugu

SEQ ID NO: 419547 - RNA, 32 nt, Homo Sapiens
caagauguggagguggaagacagugauauugu

SEQ ID NO: 419548 - RNA, 32 nt, Homo Sapiens
accgcccgcgucccggcccccggcaccaugga

SEQ ID NO: 419549 - RNA, 32 nt, Homo Sapiens
aucaggaagcugguguucagagggaucauggg

SEQ ID NO: 419550 - RNA, 32 nt, Homo Sapiens
ggaggcgaaguugcuagaagauacguaagagg

SEQ ID NO: 419551 - RNA, 32 nt, Homo Sapiens
ugggcuggggccuaggcagggcugggaugagg

SEQ ID NO: 419552 - RNA, 32 nt, Homo Sapiens
gggcugggggcucuucccuggaggaagcggcc

SEQ ID NO: 419553 - RNA, 32 nt, Homo Sapiens
cauguguucgccuccgccccccacccuugcca

SEQ ID NO: 419554 - RNA, 32 nt, Homo Sapiens
ccuuccccagcuugcucggucccggccacccc

SEQ ID NO: 419555 - RNA, 32 nt, Homo Sapiens
auuucuguagcaucugccuucaucucaucuca

SEQ ID NO: 419556 - RNA, 31 nt, Homo Sapiens
gcuggggagccccagggauagcggucggacu

SEQ ID NO: 419557 - RNA, 32 nt, Homo Sapiens
gcaaugccucuacuucccgcaaggccuaccgg

SEQ ID NO: 419558 - RNA, 32 nt, Homo Sapiens
augagauauuaaaacuuuuucauuauuauccu

SEQ ID NO: 419559 - RNA, 32 nt, Homo Sapiens
auuuggggaaaacaggcucccucgguagcucg

SEQ ID NO: 419560 - RNA, 32 nt, Homo Sapiens
caaagccucgggcagcucuaguggacguauaa

SEQ ID NO: 419561 - RNA, 32 nt, Homo Sapiens
ucugcccuuggacaucagaacuccuggcucuc

SEQ ID NO: 419562 - RNA, 32 nt, Homo Sapiens
ugaauggccuucauaucauccacacaugaauc

SEQ ID NO: 419563 - RNA, 32 nt, Homo Sapiens
uuucugucuauuucucuguuuaucuuucuguc

SEQ ID NO: 419564 - RNA, 32 nt, Homo Sapiens
gaaaggacacugggcuuugugcuggcaaaggc

SEQ ID NO: 419565 - RNA, 32 nt, Homo Sapiens
ccugagaaaaagaaaugagaucugucaagacu

SEQ ID NO: 419566 - RNA, 32 nt, Homo Sapiens
uagugcugucuccgcuuuucuuucaccuucac

SEQ ID NO: 419567 - RNA, 32 nt, Homo Sapiens
gcuucacgcucuccgcuccaccccuuagccug

SEQ ID NO: 419568 - RNA, 32 nt, Homo Sapiens
agcucugagccgcgcuuuccccuccucccugg

SEQ ID NO: 419569 - RNA, 32 nt, Homo Sapiens
ucuuggaaauuuaauggcaaauguaaaauaca

SEQ ID NO: 419570 - RNA, 32 nt, Homo Sapiens
uuugcacuuuuucccugcuugauuccaagagu

SEQ ID NO: 419571 - RNA, 32 nt, Homo Sapiens
cagggcaugccuggccugaggacccggcgcug

SEQ ID NO: 419572 - RNA, 32 nt, Homo Sapiens
cgacacccagggaaggcggcgcggccgggucc

SEQ ID NO: 419573 - RNA, 32 nt, Homo Sapiens
ggacccaggcgccagcagccccgggacacagg

SEQ ID NO: 419574 - RNA, 32 nt, Homo Sapiens
uuaugaaguuuggauuuaggaaugggaggcca

SEQ ID NO: 419575 - RNA, 32 nt, Homo Sapiens
cuauagaucaauuacaugucacagggguuugg

SEQ ID NO: 419576 - RNA, 32 nt, Homo Sapiens
ugcucuuuaaacaaugagggagcucaguguuu

SEQ ID NO: 419577 - RNA, 32 nt, Homo Sapiens
augggcugaggguggggaguggucaggugacu

SEQ ID NO: 419578 - RNA, 32 nt, Homo Sapiens
auuuuaggauugaguuucacuuccucacugac

SEQ ID NO: 419579 - RNA, 32 nt, Homo Sapiens
gcgccacugcgcugcgccccaggacccgcugc

SEQ ID NO: 419580 - RNA, 29 nt, Homo Sapiens
uaccauauuuguauguaguguauguaauu

SEQ ID NO: 419581 - RNA, 32 nt, Homo Sapiens
uauuaugauaucaaaguuaaauuuaugaugaa

SEQ ID NO: 419582 - RNA, 32 nt, Homo Sapiens
gaaauauaucuguuauaauuauacaggcucug

SEQ ID NO: 419583 - RNA, 32 nt, Homo Sapiens
auuauguaugucuuuaacuucuuucuuuccca

SEQ ID NO: 419584 - RNA, 32 nt, Homo Sapiens
caauauuuuuauucugggccaccucucgacug

SEQ ID NO: 419585 - RNA, 32 nt, Homo Sapiens
ugauauuuuuugcugcuuccucggcccaggga

SEQ ID NO: 419586 - RNA, 32 nt, Homo Sapiens
gcuaauaaacacauuuguaaaaacauuguuug

SEQ ID NO: 419587 - RNA, 32 nt, Homo Sapiens
guauuaugucucuucucguacguggcugcagu

SEQ ID NO: 419588 - RNA, 32 nt, Homo Sapiens
agaagugacauacacaauauaaaucauauguc

SEQ ID NO: 419589 - RNA, 32 nt, Homo Sapiens
gugguggggggcacauagauuccccggugggu

SEQ ID NO: 419590 - RNA, 32 nt, Homo Sapiens
guuuucucaaauuuuuaccaaucccugcauua

SEQ ID NO: 419591 - RNA, 32 nt, Homo Sapiens
ucucaggccagcugcuugggcuucauccuccu

SEQ ID NO: 419592 - RNA, 32 nt, Homo Sapiens
ggggacccuccuuuucuccccaucccaccugu

SEQ ID NO: 419593 - RNA, 32 nt, Homo Sapiens
gcuuucugucuccuuaacacugagcugucaug

SEQ ID NO: 419594 - RNA, 32 nt, Homo Sapiens
aacggcuuucugccccuucucucgccaccccu

SEQ ID NO: 419595 - RNA, 32 nt, Homo Sapiens
uaugugcacugagggugacacuucugagugug

SEQ ID NO: 419596 - RNA, 32 nt, Homo Sapiens
aggcccauuuucugccuggcagggggcagguc

SEQ ID NO: 419597 - RNA, 32 nt, Homo Sapiens
ccccgcaccuccugcgaucuggcuggcuugga

SEQ ID NO: 419598 - RNA, 32 nt, Homo Sapiens
aaaucugaauuccgaacauguuguguggaaua

SEQ ID NO: 419599 - RNA, 29 nt, Homo Sapiens
ucucugauauuuauguaccaugaggggaa

SEQ ID NO: 419600 - RNA, 32 nt, Homo Sapiens
agaacgaacagguaguuugguggagcugagcu

SEQ ID NO: 419601 - RNA, 32 nt, Homo Sapiens
cugcgcagggcggggccggccgaaccaugggc

SEQ ID NO: 419602 - RNA, 32 nt, Homo Sapiens
uaagucggugagacauggcugaagauaaaagc

SEQ ID NO: 419603 - RNA, 32 nt, Homo Sapiens
agggcggcuuuccuuccagcgagcaucauucg

SEQ ID NO: 419604 - RNA, 32 nt, Homo Sapiens
uuuaaagggcauuugaggggaggauuauugcu

SEQ ID NO: 419605 - RNA, 32 nt, Homo Sapiens
aguacuccccucggggauacgacacaugccca

SEQ ID NO: 419606 - RNA, 32 nt, Homo Sapiens
gaaugacagcgaaccuccuggacccucaccau

SEQ ID NO: 419607 - RNA, 32 nt, Homo Sapiens
ucuccugggugugguaucucagggccagccaa

SEQ ID NO: 419608 - RNA, 32 nt, Homo Sapiens
cagggcagggguuggaggagcgaggagcagua

SEQ ID NO: 419609 - RNA, 31 nt, Homo Sapiens
gguuacagucagaaaaaauaaacuagauguu

SEQ ID NO: 419610 - RNA, 32 nt, Homo Sapiens
ucuuuuaaguacccccuuuccuccucacccac

SEQ ID NO: 419611 - RNA, 32 nt, Homo Sapiens
uucguucugagacccgcacccugguuguucac

SEQ ID NO: 419612 - RNA, 32 nt, Homo Sapiens
cacucagaagacacugaugggcaacccccagc

SEQ ID NO: 419613 - RNA, 32 nt, Homo Sapiens
agugagaaacaguagauuggugaagacagaca

SEQ ID NO: 419614 - RNA, 32 nt, Homo Sapiens
gcaccggagcugcggcggcugcggcggcgaca

SEQ ID NO: 419615 - RNA, 32 nt, Homo Sapiens
guccgagagucuuaaaauccugcucuggccgg

SEQ ID NO: 419616 - RNA, 32 nt, Homo Sapiens
caccgguaaucccagcacuuugggaggccgag

SEQ ID NO: 419617 - RNA, 32 nt, Homo Sapiens
ucaauuuuacuuuguacuguacaucuuuuuac

SEQ ID NO: 419618 - RNA, 32 nt, Homo Sapiens
ccgaggccgggcggugagaagggugcggcccg

SEQ ID NO: 419619 - RNA, 30 nt, Homo Sapiens
cacuuccaugcucuucuugagggugggcug

SEQ ID NO: 419620 - RNA, 32 nt, Homo Sapiens
uuaauauuugguugcauagugacugagucaga

SEQ ID NO: 419621 - RNA, 32 nt, Homo Sapiens
gcuuaccugugaauagcccaauaaacaugaca

SEQ ID NO: 419622 - RNA, 32 nt, Homo Sapiens
uaaugaauguauauaauaauaauuacuguaua

SEQ ID NO: 419623 - RNA, 32 nt, Homo Sapiens
cucuacaaaaauacaaaaauuagccagguuug

SEQ ID NO: 419624 - RNA, 32 nt, Homo Sapiens
uggagcccagcacccccuccccgcccauccuu

SEQ ID NO: 419625 - RNA, 32 nt, Homo Sapiens
agcaguccccgggcuugcgcggcgcggagagg

SEQ ID NO: 419626 - RNA, 32 nt, Homo Sapiens
guaugaauuauucacauaaagcuugaucuuuc

SEQ ID NO: 419627 - RNA, 31 nt, Homo Sapiens
ggggaaagacacugccugggcugaccccggu

SEQ ID NO: 419628 - RNA, 32 nt, Homo Sapiens
ggagaggaccggcgaggcgcgccagccggagc

SEQ ID NO: 419629 - RNA, 32 nt, Homo Sapiens
agacaccauccgugcuccugguaaagggggac

SEQ ID NO: 419630 - RNA, 32 nt, Homo Sapiens
caucccuccaaggccugacucccuuucacuac

SEQ ID NO: 419631 - RNA, 32 nt, Homo Sapiens
cgauagauggugcugggauaagcagcucaguc

SEQ ID NO: 419632 - RNA, 32 nt, Homo Sapiens
gagcguggcugagggaggggcagacggauggc

SEQ ID NO: 419633 - RNA, 32 nt, Homo Sapiens
auaucauuuccuagacucuacuccaugauuua

SEQ ID NO: 419634 - RNA, 32 nt, Homo Sapiens
ucgccuugggugucccucuccugccucagcuu

SEQ ID NO: 419635 - RNA, 31 nt, Homo Sapiens
aagaaaugggccugccugccuccacccgucc

SEQ ID NO: 419636 - RNA, 32 nt, Homo Sapiens
ggggcccaggacuuggccggcgugaucucagc

SEQ ID NO: 419637 - RNA, 32 nt, Homo Sapiens
guguugucaacacuuguuauguuucuucuuuu

SEQ ID NO: 419638 - RNA, 32 nt, Homo Sapiens
aagcauuaagguaacccauugccaaguaucau

SEQ ID NO: 419639 - RNA, 32 nt, Homo Sapiens
uucagugccagccagcagcauuucuuaaucua

SEQ ID NO: 419640 - RNA, 32 nt, Homo Sapiens
ucgccugacuuucuguugaauugggaaagagc

SEQ ID NO: 419641 - RNA, 32 nt, Homo Sapiens
cugaguugggggugggguuugauagggaaggg

SEQ ID NO: 419642 - RNA, 32 nt, Homo Sapiens
caaauuauuuaguauaccugaaucuugguuuc

SEQ ID NO: 419643 - RNA, 32 nt, Homo Sapiens
gcuugaguggauuaaugaauauuguuaagcua

SEQ ID NO: 419644 - RNA, 32 nt, Homo Sapiens
acacccuuucaguaugggacugcacaaauaaa

SEQ ID NO: 419645 - RNA, 32 nt, Homo Sapiens
gcuacuucaguuuggagcacaaacauaugauc

SEQ ID NO: 419646 - RNA, 32 nt, Homo Sapiens
guuggaagggguuuauuaugacugcuggugaa

SEQ ID NO: 419647 - RNA, 32 nt, Homo Sapiens
aaaccagaaaaaacaaaacuggauacaugugc

SEQ ID NO: 419648 - RNA, 32 nt, Homo Sapiens
augaucucggcucacugcaacccccaucuccc

SEQ ID NO: 419649 - RNA, 32 nt, Homo Sapiens
gcuacuuugccagcuagaggccgccacgcaag

SEQ ID NO: 419650 - RNA, 32 nt, Homo Sapiens
cugcacccgcaccccacccccagaccucaccc

SEQ ID NO: 419651 - RNA, 32 nt, Homo Sapiens
cgugugcggcgcagugagucgcagccauguuc

SEQ ID NO: 419652 - RNA, 28 nt, Homo Sapiens
ggccaguugacauccaggauggcugcaa

SEQ ID NO: 419653 - RNA, 32 nt, Homo Sapiens
accuggcgacguauaccaggugucccaccccu

SEQ ID NO: 419654 - RNA, 32 nt, Homo Sapiens
cuccccuguaguuuaggacacaaaacagcuac

SEQ ID NO: 419655 - RNA, 32 nt, Homo Sapiens
cucugcagaaauuuuuuuuucuuuugcuugua

SEQ ID NO: 419656 - RNA, 32 nt, Homo Sapiens
aguaaaccucuccaccaaggaacuguguucag

SEQ ID NO: 419657 - RNA, 28 nt, Homo Sapiens
cauugaguuacagcuuagugaugauuuu

SEQ ID NO: 419658 - RNA, 32 nt, Homo Sapiens
gccggaaguguuguggccgccgccgccgcgcg

SEQ ID NO: 419659 - RNA, 28 nt, Homo Sapiens
acuuggaaagauuuuaccugugaaguga

SEQ ID NO: 419660 - RNA, 32 nt, Homo Sapiens
cugcauuuacacacacacacacacacacacgc

SEQ ID NO: 419661 - RNA, 31 nt, Homo Sapiens
gagcagagggcgggugcgagggcgcgaggga

SEQ ID NO: 419662 - RNA, 30 nt, Homo Sapiens
cuccuugucugugcauccgggggcagcucu

SEQ ID NO: 419663 - RNA, 32 nt, Homo Sapiens
auguugucugugcugcagauuggcccaugugg

SEQ ID NO: 419664 - RNA, 32 nt, Homo Sapiens
auugccuguaaaggaaaccucuccaugaaaag

SEQ ID NO: 419665 - RNA, 32 nt, Homo Sapiens
cagccagccucccagcuaaaggugcucagagc

SEQ ID NO: 419666 - RNA, 32 nt, Homo Sapiens
acggcuccugcaccggccccaagggccucucu

SEQ ID NO: 419667 - RNA, 32 nt, Homo Sapiens
cucccucucucugcagaacgggcucaugucgg

SEQ ID NO: 419668 - RNA, 28 nt, Homo Sapiens
cagccggcgcggccgccagcgcggugua

SEQ ID NO: 419669 - RNA, 32 nt, Homo Sapiens
ccuuguacacaaauggaggugcucuuacagaa

SEQ ID NO: 419670 - RNA, 32 nt, Homo Sapiens
ccgaggccugcgcaugcucggugcugcgcggg

SEQ ID NO: 419671 - RNA, 32 nt, Homo Sapiens
acugauugacccccacccccauaggugcuguc

SEQ ID NO: 419672 - RNA, 32 nt, Homo Sapiens
guuucacaaaagcuucaaaaaauauacuaauu

SEQ ID NO: 419673 - RNA, 32 nt, Homo Sapiens
ucaaguaugcaacauaaauccuguuccuucca

SEQ ID NO: 419674 - RNA, 32 nt, Homo Sapiens
gucucuucauuuccucucaaaucuucaacucu

SEQ ID NO: 419675 - RNA, 32 nt, Homo Sapiens
aauuuugaagcgucuuuuuucuuucuuuuuuc

SEQ ID NO: 419676 - RNA, 32 nt, Homo Sapiens
cgcagugccaauggggccauccuugccuacga

SEQ ID NO: 419677 - RNA, 32 nt, Homo Sapiens
aaaaccucauuugggaagaaaagcuguaggga

SEQ ID NO: 419678 - RNA, 32 nt, Homo Sapiens
uugcugaagagauccccuccccugccccuggg

SEQ ID NO: 419679 - RNA, 32 nt, Homo Sapiens
gagcuggcggguggacgggcauggauccaggc

SEQ ID NO: 419680 - RNA, 31 nt, Homo Sapiens
cacauccaagccauuacuuauuagagucuca

SEQ ID NO: 419681 - RNA, 32 nt, Homo Sapiens
cucggccuaaauagguuuuucuugcuauguua

SEQ ID NO: 419682 - RNA, 32 nt, Homo Sapiens
agaaucagcccucuuaagucagcccucucuau

SEQ ID NO: 419683 - RNA, 32 nt, Homo Sapiens
uuaauaguuuuccuuucaguuugugagcucuu

SEQ ID NO: 419684 - RNA, 32 nt, Homo Sapiens
ccgcccccuaaaaaugacguuauuaaauguug

SEQ ID NO: 419685 - RNA, 32 nt, Homo Sapiens
auugguuauuuuuaagcaauacaaaaugccaa

SEQ ID NO: 419686 - RNA, 32 nt, Homo Sapiens
ggagugcagugccgcgaucucggcucacugca

SEQ ID NO: 419687 - RNA, 32 nt, Homo Sapiens
uagguucaggucagcucugccccuccgccccc

SEQ ID NO: 419688 - RNA, 32 nt, Homo Sapiens
aggaaggagaggugcugccggaggaggucgug

SEQ ID NO: 419689 - RNA, 32 nt, Homo Sapiens
gugauaucugugcuucucauaauuacugaaag

SEQ ID NO: 419690 - RNA, 32 nt, Homo Sapiens
uguucacauuuucuccagccugagacgcagcc

SEQ ID NO: 419691 - RNA, 27 nt, Homo Sapiens
gcauggugcucgcggccccgcugcugc

SEQ ID NO: 419692 - RNA, 32 nt, Homo Sapiens
ggcagcgggaggaggggcggcgcgaaccaugg

SEQ ID NO: 419693 - RNA, 32 nt, Homo Sapiens
accuggggggcugagguugcagugagccgaga

SEQ ID NO: 419694 - RNA, 32 nt, Homo Sapiens
uacccaauuguuuuuucuuuucaacauuacca

SEQ ID NO: 419695 - RNA, 32 nt, Homo Sapiens
gaguuuccucggagcauucaaccgggcuucuu

SEQ ID NO: 419696 - RNA, 32 nt, Homo Sapiens
uccugggccccgggcgaggucccgcccucccg

SEQ ID NO: 419697 - RNA, 32 nt, Homo Sapiens
gaagccuucuccagcuucaucaucucacagug

SEQ ID NO: 419698 - RNA, 32 nt, Homo Sapiens
ccaucgaagaaaccuggugucuggcaugaaau

SEQ ID NO: 419699 - RNA, 32 nt, Homo Sapiens
gcaccuuuucuuuuucucccuaaacuguacau

SEQ ID NO: 419700 - RNA, 32 nt, Homo Sapiens
cagaggaaauacccugguggagcccuccuucc

SEQ ID NO: 419701 - RNA, 32 nt, Homo Sapiens
auguuugaggauguuuuaaauacaugcauugu

SEQ ID NO: 419702 - RNA, 32 nt, Homo Sapiens
uuucuauagauauuaaauuaacuaaaaguauc

SEQ ID NO: 419703 - RNA, 32 nt, Homo Sapiens
ucgaauuuaaaaucagaaaaucaugucaguga

SEQ ID NO: 419704 - RNA, 32 nt, Homo Sapiens
uccuccccaacccccgagcucccugguaaccu

SEQ ID NO: 419705 - RNA, 32 nt, Homo Sapiens
uguuaagcuuaugaacaccuaaucuuauugcu

SEQ ID NO: 419706 - RNA, 32 nt, Homo Sapiens
ccuggagcccccagcccaucccaucuggugcu

SEQ ID NO: 419707 - RNA, 32 nt, Homo Sapiens
uggcaaaaacagaaacagaacaucaguguuuu

SEQ ID NO: 419708 - RNA, 32 nt, Homo Sapiens
acaacuuacuacuuugauguccuguuggcuca

SEQ ID NO: 419709 - RNA, 32 nt, Homo Sapiens
uguugucauuuaaugggaaaggcugggaucau

SEQ ID NO: 419710 - RNA, 32 nt, Homo Sapiens
cagccucacucugucuccggcccgcagcagga

SEQ ID NO: 419711 - RNA, 32 nt, Homo Sapiens
ccucuacacagagaggcugcucugccauacgc

SEQ ID NO: 419712 - RNA, 32 nt, Homo Sapiens
ucccagggucccugggguggggauagggagca

SEQ ID NO: 419713 - RNA, 32 nt, Homo Sapiens
cccacccgccucuuccccuuucugucccggga

SEQ ID NO: 419714 - RNA, 32 nt, Homo Sapiens
ugucugugaaaauuaucauuugauauuuggcu

SEQ ID NO: 419715 - RNA, 32 nt, Homo Sapiens
ccaggcucccgcuccgguugcggccgcaccgc

SEQ ID NO: 419716 - RNA, 32 nt, Homo Sapiens
cacaaaaucagaagcuggguauaauauuucaa

SEQ ID NO: 419717 - RNA, 32 nt, Homo Sapiens
gagacccggccgccaccccacccgcuacccuu

SEQ ID NO: 419718 - RNA, 32 nt, Homo Sapiens
gggaaccgagaccagcaccccgcacgucagcc

SEQ ID NO: 419719 - RNA, 32 nt, Homo Sapiens
ccacaccagcuccuaggcacugagagcacgag

SEQ ID NO: 419720 - RNA, 32 nt, Homo Sapiens
aauguacuuuuucuuuccuuagacuuuggcuu

SEQ ID NO: 419721 - RNA, 32 nt, Homo Sapiens
gguuucaccauguuggccaggcuggucucuga

SEQ ID NO: 419722 - RNA, 32 nt, Homo Sapiens
cucacgcggagcagagcugagcugaagcggga

SEQ ID NO: 419723 - RNA, 32 nt, Homo Sapiens
gcaagauguggaacaucaacuaccuauuuucc

SEQ ID NO: 419724 - RNA, 32 nt, Homo Sapiens
ccucuugaaucacuuaaaguauugugcccugg

SEQ ID NO: 419725 - RNA, 32 nt, Homo Sapiens
cggcaccucgagagagaagggcccggagggug

SEQ ID NO: 419726 - RNA, 32 nt, Homo Sapiens
cgcuugccaggaaugcccgagaucuggcaccu

SEQ ID NO: 419727 - RNA, 32 nt, Homo Sapiens
uagaaaacacaagcauuugaccaaaugagauc

SEQ ID NO: 419728 - RNA, 32 nt, Homo Sapiens
uaaucuuugcuuguuuucuacucugugaucuu

SEQ ID NO: 419729 - RNA, 30 nt, Homo Sapiens
gcgugcugagcugggccgccggcccgggug

SEQ ID NO: 419730 - RNA, 32 nt, Homo Sapiens
ccaauuucauccagcugcuaucagcgcagugg

SEQ ID NO: 419731 - RNA, 32 nt, Homo Sapiens
agcucuguuuccucuacuccuggcucagaaac

SEQ ID NO: 419732 - RNA, 32 nt, Homo Sapiens
acuccgccggcgacuccgcuuugacacuacuc

SEQ ID NO: 419733 - RNA, 32 nt, Homo Sapiens
gggagguugggcggggcggugcugggacuggg

SEQ ID NO: 419734 - RNA, 32 nt, Homo Sapiens
cucaaguccuuugaauguuccaacaaauucaa

SEQ ID NO: 419735 - RNA, 32 nt, Homo Sapiens
gagcaugggggcgggggcucuggagugguggg

SEQ ID NO: 419736 - RNA, 32 nt, Homo Sapiens
gagcugcuggaacaggagaggcuucaggagca

SEQ ID NO: 419737 - RNA, 32 nt, Homo Sapiens
gucugcgcccagccaugugaccccgcucgucc

SEQ ID NO: 419738 - RNA, 32 nt, Homo Sapiens
acuuuggaaauauuuaugcuuuucuuugugug

SEQ ID NO: 419739 - RNA, 32 nt, Homo Sapiens
cgugggggccacugaucuuccuggacaggagu

SEQ ID NO: 419740 - RNA, 32 nt, Homo Sapiens
uccuuccccaugagcccucccugucugcacug

SEQ ID NO: 419741 - RNA, 32 nt, Homo Sapiens
ccgucccguccgucugucuguuaucgucuguc

SEQ ID NO: 419742 - RNA, 32 nt, Homo Sapiens
ccuaaggaaaacggucugcauuugagcucugg

SEQ ID NO: 419743 - RNA, 32 nt, Homo Sapiens
gauuguauuauuagucuguuuuuaaauguuuu

SEQ ID NO: 419744 - RNA, 32 nt, Homo Sapiens
ccccuuucccuuagaucaugguaaauuuuucu

SEQ ID NO: 419745 - RNA, 32 nt, Homo Sapiens
aaacggccgggcggcgguggcuguagguugug

SEQ ID NO: 419746 - RNA, 32 nt, Homo Sapiens
guucaggggauccuucuguuucucacggggug

SEQ ID NO: 419747 - RNA, 32 nt, Homo Sapiens
gagaaagaauccaaacagcuugguggguggcu

SEQ ID NO: 419748 - RNA, 32 nt, Homo Sapiens
uccuccguagcgggaggcucuggccucaccgc

SEQ ID NO: 419749 - RNA, 32 nt, Homo Sapiens
guaauucuucauaguuuuuuuaaucuauggau

SEQ ID NO: 419750 - RNA, 32 nt, Homo Sapiens
aaagaauugguaauugaccggaggaaggcaug

SEQ ID NO: 419751 - RNA, 32 nt, Homo Sapiens
ggagcuggggaccacagacuggaccggcucuc

SEQ ID NO: 419752 - RNA, 32 nt, Homo Sapiens
gggccaucccccuccacccccacccugaggcu

SEQ ID NO: 419753 - RNA, 32 nt, Homo Sapiens
auagacccucuuuggccauacacuccaugccu

SEQ ID NO: 419754 - RNA, 32 nt, Homo Sapiens
uuaaacuugcaaaaucacuaggaucuccauuu

SEQ ID NO: 419755 - RNA, 32 nt, Homo Sapiens
uggacguaggggacccuugguuccgccguuau

SEQ ID NO: 419756 - RNA, 32 nt, Homo Sapiens
gcucaucgucaaugccagcugcacgguggugc

SEQ ID NO: 419757 - RNA, 32 nt, Homo Sapiens
aacuuacgaaacaugcauagcauuagaagaca

SEQ ID NO: 419758 - RNA, 32 nt, Homo Sapiens
uccuacuuuucuccgcccccagcccccgcccc

SEQ ID NO: 419759 - RNA, 32 nt, Homo Sapiens
caauucugccccagccucccaaguagcuggga

SEQ ID NO: 419760 - RNA, 29 nt, Homo Sapiens
caggauguggcugggccgccgggcccugu

SEQ ID NO: 419761 - RNA, 32 nt, Homo Sapiens
aaaccucauuggcuccucacuggaucagacca

SEQ ID NO: 419762 - RNA, 32 nt, Homo Sapiens
gguuauaucaaacuuuuacgacuuuuacauuu

SEQ ID NO: 419763 - RNA, 32 nt, Homo Sapiens
ccggcgaggugcggggucuggugaugcgagcu

SEQ ID NO: 419764 - RNA, 32 nt, Homo Sapiens
cggcccgggaggaggcggggggcacggccuuu

SEQ ID NO: 419765 - RNA, 32 nt, Homo Sapiens
caaauccccuaugacacaaguuuaccuaugua

SEQ ID NO: 419766 - RNA, 32 nt, Homo Sapiens
agaagaucaaggaguacaaugcccagaucaac

SEQ ID NO: 419767 - RNA, 32 nt, Homo Sapiens
ugaucauuacuucugcauuuuauuuuuguuuu

SEQ ID NO: 419768 - RNA, 32 nt, Homo Sapiens
auuucuagaggaggggcaaacacccagacagu

SEQ ID NO: 419769 - RNA, 32 nt, Homo Sapiens
aagagcaguaucagcaucaucugggaacuugu

SEQ ID NO: 419770 - RNA, 32 nt, Homo Sapiens
auaucuguuagaaagaaauugccagugagcaa

SEQ ID NO: 419771 - RNA, 32 nt, Homo Sapiens
uacaccaccaccugggcugugcucuccggcuc

SEQ ID NO: 419772 - RNA, 32 nt, Homo Sapiens
cuggccucugcccacaccuugacuucaguauu

SEQ ID NO: 419773 - RNA, 32 nt, Homo Sapiens
gaaagcagcacgacuugaaacuuccuacaugu

SEQ ID NO: 419774 - RNA, 32 nt, Homo Sapiens
cacuguguuucuggugccaaggcucuugaggg

SEQ ID NO: 419775 - RNA, 32 nt, Homo Sapiens
gcugcccggcgcgacccuuucuccggacccag

SEQ ID NO: 419776 - RNA, 32 nt, Homo Sapiens
aagcaacagcuauuaauacugaugugauggau

SEQ ID NO: 419777 - RNA, 32 nt, Homo Sapiens
aauuguuacauauccuauuucaugccauucuu

SEQ ID NO: 419778 - RNA, 32 nt, Homo Sapiens
caucgcgggcagugggaagcagugggguaacg

SEQ ID NO: 419779 - RNA, 32 nt, Homo Sapiens
gaacagacaauacuugucuuucugggcauucg

SEQ ID NO: 419780 - RNA, 32 nt, Homo Sapiens
uuagggccaaaauaccacggacaugcuagugc

SEQ ID NO: 419781 - RNA, 32 nt, Homo Sapiens
uacauaaaauuugaauagaacacucaagaagu

SEQ ID NO: 419782 - RNA, 32 nt, Homo Sapiens
cuccgccccgucugcgauucggaagccggccu

SEQ ID NO: 419783 - RNA, 29 nt, Homo Sapiens
ugugucauauguauguacauguauauguc

SEQ ID NO: 419784 - RNA, 32 nt, Homo Sapiens
gugcccaaagucugugugaugaacuuucucuu

SEQ ID NO: 419785 - RNA, 32 nt, Homo Sapiens
caaaaacagucaaacucuauaaaauacuugga

SEQ ID NO: 419786 - RNA, 32 nt, Homo Sapiens
uuuaagucugcaugaauauuaaggagugacag

SEQ ID NO: 419787 - RNA, 32 nt, Homo Sapiens
cuguuaagggaagcugauacagagagacaacu

SEQ ID NO: 419788 - RNA, 32 nt, Homo Sapiens
ccuuaauccaacaguacaguaauuagccgaaa

SEQ ID NO: 419789 - RNA, 32 nt, Homo Sapiens
gcgagggccaacccggccccucuguccccuug

SEQ ID NO: 419790 - RNA, 32 nt, Homo Sapiens
gguagguucugguaauuuccucuucuugaucu

SEQ ID NO: 419791 - RNA, 32 nt, Homo Sapiens
ugcugucagguggcucaggucuucaacggggc

SEQ ID NO: 419792 - RNA, 32 nt, Homo Sapiens
auuuuggugugcuccccaccacagcaauaaca

SEQ ID NO: 419793 - RNA, 32 nt, Homo Sapiens
guggcuccgggugugcgccgcugcgauagcgg

SEQ ID NO: 419794 - RNA, 30 nt, Homo Sapiens
agaaaagagaagcucugauucagcuggggc

SEQ ID NO: 419795 - RNA, 32 nt, Homo Sapiens
gcuccuccuccggggagacgccgggggccugg

SEQ ID NO: 419796 - RNA, 32 nt, Homo Sapiens
cugucauacuguaucuggaaugcuuuguaaua

SEQ ID NO: 419797 - RNA, 32 nt, Homo Sapiens
accauguuguacaacagaucuuuagaccuuac

SEQ ID NO: 419798 - RNA, 32 nt, Homo Sapiens
agagauuccagaagccucuccuccccgccgcc

SEQ ID NO: 419799 - RNA, 32 nt, Homo Sapiens
cccggcucaccgcccccuccccugcagccccg

SEQ ID NO: 419800 - RNA, 32 nt, Homo Sapiens
auuucagaacagacccuccuggagcuguccaa

SEQ ID NO: 419801 - RNA, 32 nt, Homo Sapiens
ugcaguuaaguacaaaaagauacuuaauuugg

SEQ ID NO: 419802 - RNA, 32 nt, Homo Sapiens
caucagucaggagcugggaguugagaccucca

SEQ ID NO: 419803 - RNA, 30 nt, Homo Sapiens
accugagagguuccuggcgcccugaggugg

SEQ ID NO: 419804 - RNA, 32 nt, Homo Sapiens
cgguugugugcuuccgaaugggcucacucccg

SEQ ID NO: 419805 - RNA, 32 nt, Homo Sapiens
gcugccucggagcccuggcccuuggguccccc

SEQ ID NO: 419806 - RNA, 32 nt, Homo Sapiens
guagaaaugagaaauaaaugucgauuguuggu

SEQ ID NO: 419807 - RNA, 32 nt, Homo Sapiens
cuuaauuauaggguuguaauguuuauaggguu

SEQ ID NO: 419808 - RNA, 28 nt, Homo Sapiens
aagaugggcgacccggaucuccuggaag

SEQ ID NO: 419809 - RNA, 32 nt, Homo Sapiens
cuguuaaguauuuaugauacugucaauugcug

SEQ ID NO: 419810 - RNA, 32 nt, Homo Sapiens
agagccaguggccacagcugcagagcacugca

SEQ ID NO: 419811 - RNA, 32 nt, Homo Sapiens
aguggcaaauucaaaucaacucauauaaaacu

SEQ ID NO: 419812 - RNA, 32 nt, Homo Sapiens
ugcaugauaaaacuuuggucuccacaaccucu

SEQ ID NO: 419813 - RNA, 32 nt, Homo Sapiens
ccugcucaucucugcccugaggucaccccgug

SEQ ID NO: 419814 - RNA, 32 nt, Homo Sapiens
gaaacuauuuagugcgcagauauugucucugu

SEQ ID NO: 419815 - RNA, 31 nt, Homo Sapiens
ucccuagcgggccccucagggagaaauagcc

SEQ ID NO: 419816 - RNA, 32 nt, Homo Sapiens
uacgcaccugggaccugcaggcggcggcgcag

SEQ ID NO: 419817 - RNA, 32 nt, Homo Sapiens
uuucugcagggccagaggugacccugccuggc

SEQ ID NO: 419818 - RNA, 31 nt, Homo Sapiens
uuuacaaugaauggacacagugaugaagaaa

SEQ ID NO: 419819 - RNA, 32 nt, Homo Sapiens
caucgaggaagccgaaaauaugcaaagaccaa

SEQ ID NO: 419820 - RNA, 32 nt, Homo Sapiens
ugggcuggcucccucuuggucuucccaggcug

SEQ ID NO: 419821 - RNA, 30 nt, Homo Sapiens
gacucugucgccaucacccucgacucgcac

SEQ ID NO: 419822 - RNA, 32 nt, Homo Sapiens
agauaugugaauggacuccauggacagaaaag

SEQ ID NO: 419823 - RNA, 32 nt, Homo Sapiens
gguacaaugaucaaaaucauguuuuuucuuaa

SEQ ID NO: 419824 - RNA, 32 nt, Homo Sapiens
guuuguuauaaaucagaaauggguccaugaug

SEQ ID NO: 419825 - RNA, 32 nt, Homo Sapiens
ggacgccuccaagcccgcucccugcucaggag

SEQ ID NO: 419826 - RNA, 32 nt, Homo Sapiens
agcuucccagcccagcuggggcacccacugga

SEQ ID NO: 419827 - RNA, 32 nt, Homo Sapiens
ccccaggcccccagccauggcccugucccugc

SEQ ID NO: 419828 - RNA, 32 nt, Homo Sapiens
ucaaaauaaaggaaacacauuucauauaaaaa

SEQ ID NO: 419829 - RNA, 32 nt, Homo Sapiens
auuaauacauauuuagauugcauucaagcuac

SEQ ID NO: 419830 - RNA, 32 nt, Homo Sapiens
uuuuaaaguauuuauuauaguugucaacuagu

SEQ ID NO: 419831 - RNA, 32 nt, Homo Sapiens
uuccagucucugaguucuaccugauguaacuc

SEQ ID NO: 419832 - RNA, 32 nt, Homo Sapiens
accugccgcccaugguaucuguguuccaguuc

SEQ ID NO: 419833 - RNA, 32 nt, Homo Sapiens
aggcgggcagaucaccugaggucacgaguuca

SEQ ID NO: 419834 - RNA, 32 nt, Homo Sapiens
aaaugaaaccauccuagaggauuaugaggaau

SEQ ID NO: 419835 - RNA, 32 nt, Homo Sapiens
acacaacgcacugcagccucuaccuccugggc

SEQ ID NO: 419836 - RNA, 32 nt, Homo Sapiens
uuuucccaggacacgguggguggggagcuagg

SEQ ID NO: 419837 - RNA, 32 nt, Homo Sapiens
aggaggaaacaugggggauacuggccugagaa

SEQ ID NO: 419838 - RNA, 29 nt, Homo Sapiens
cgccaugugggggcuccugcucgcccugg

SEQ ID NO: 419839 - RNA, 32 nt, Homo Sapiens
gauucagggugccaaugaccuccccgcgaacg

SEQ ID NO: 419840 - RNA, 32 nt, Homo Sapiens
ccugggcagaaagacuccagcaggugagcucu

SEQ ID NO: 419841 - RNA, 32 nt, Homo Sapiens
aggauaaacaccugggcccuggugaggcaguu

SEQ ID NO: 419842 - RNA, 32 nt, Homo Sapiens
auuuuugacaaccccuacuuuaaagauuuauu

SEQ ID NO: 419843 - RNA, 32 nt, Homo Sapiens
uuccucccggcugcgucuccaggccggacucu

SEQ ID NO: 419844 - RNA, 28 nt, Homo Sapiens
aacaugguaguagaugcuguauuugcua

SEQ ID NO: 419845 - RNA, 32 nt, Homo Sapiens
uacaagaagaacucaccaggguuuaguuugca

SEQ ID NO: 419846 - RNA, 32 nt, Homo Sapiens
cuguggggaaagggguuggggugacagucauc

SEQ ID NO: 419847 - RNA, 32 nt, Homo Sapiens
gagagaacauauaugcguuuuguuuuuaagag

SEQ ID NO: 419848 - RNA, 32 nt, Homo Sapiens
gucuauuacuugggugaguccuuguggacaac

SEQ ID NO: 419849 - RNA, 32 nt, Homo Sapiens
agugaaauucucaugaaagaauccccaagccu

SEQ ID NO: 419850 - RNA, 32 nt, Homo Sapiens
gccuuagcugcuccagcccgcgaugaggaaaa

SEQ ID NO: 419851 - RNA, 32 nt, Homo Sapiens
accauucccucccaacuccccccgaccaacac

SEQ ID NO: 419852 - RNA, 32 nt, Homo Sapiens
cgaggcuggggcaccuuucuccaggucaccaa

SEQ ID NO: 419853 - RNA, 32 nt, Homo Sapiens
acucuuuuugguauaaaaaauuuugcuagcuu

SEQ ID NO: 419854 - RNA, 32 nt, Homo Sapiens
gccccgacugcgagagugaggcacauggcccc

SEQ ID NO: 419855 - RNA, 32 nt, Homo Sapiens
uccagacuggaaaaauguguuaaucuuugcau

SEQ ID NO: 419856 - RNA, 32 nt, Homo Sapiens
gcaaaaagaacaaaguccuggaggaagcagac

SEQ ID NO: 419857 - RNA, 32 nt, Homo Sapiens
aagggugcuaggaaaccuguggaccaacauac

SEQ ID NO: 419858 - RNA, 32 nt, Homo Sapiens
cucaaagaaaucaaucauacucacaccuccuu

SEQ ID NO: 419859 - RNA, 32 nt, Homo Sapiens
ucuugcucugucugucacccaggcuggaguac

SEQ ID NO: 419860 - RNA, 30 nt, Homo Sapiens
gcuccuggggccggcgcggguuuuggauug

SEQ ID NO: 419861 - RNA, 32 nt, Homo Sapiens
agauuugaaaauaaugcacauaugguguucaa

SEQ ID NO: 419862 - RNA, 31 nt, Homo Sapiens
ccgcgucucccuggcuuuccaagggcuaaug

SEQ ID NO: 419863 - RNA, 32 nt, Homo Sapiens
guuuuuauaucgacaaugaagaugaucauauu

SEQ ID NO: 419864 - RNA, 32 nt, Homo Sapiens
ggaaguguuaccccucuuuccaagagcuccca

SEQ ID NO: 419865 - RNA, 32 nt, Homo Sapiens
agaacccaaucauauggccccauccuaacugc

SEQ ID NO: 419866 - RNA, 32 nt, Homo Sapiens
aaacaucugccaaagucugaucuguauaccca

SEQ ID NO: 419867 - RNA, 32 nt, Homo Sapiens
gccuuuugaagaaaaacagcaugugauaauau

SEQ ID NO: 419868 - RNA, 32 nt, Homo Sapiens
gcuccccaaguccagaguugcagacgcccugc

SEQ ID NO: 419869 - RNA, 32 nt, Homo Sapiens
cagggccuugcggggugcaaggugauggcugc

SEQ ID NO: 419870 - RNA, 32 nt, Homo Sapiens
gguucugcacaaaaccuuaauucuucaaggac

SEQ ID NO: 419871 - RNA, 31 nt, Homo Sapiens
uaucuucuugaauuccuucaagauugaggua

SEQ ID NO: 419872 - RNA, 32 nt, Homo Sapiens
gaccagaaauggugagauguauguuuggcucu

SEQ ID NO: 419873 - RNA, 32 nt, Homo Sapiens
aggguucucaaugcagaucucccuuuucuagu

SEQ ID NO: 419874 - RNA, 32 nt, Homo Sapiens
ucaacccaaauuucccaagacggcugaaagac

SEQ ID NO: 419875 - RNA, 32 nt, Homo Sapiens
ccccuccugggagcuaaagauauuuuagagaa

SEQ ID NO: 419876 - RNA, 32 nt, Homo Sapiens
uuugcccuggcuagaccaacccucagaacaaa

SEQ ID NO: 419877 - RNA, 32 nt, Homo Sapiens
agggaaggccccacagacaagguagcccuggc

SEQ ID NO: 419878 - RNA, 32 nt, Homo Sapiens
ucccagaccccucucaacacccgcccccccca

SEQ ID NO: 419879 - RNA, 32 nt, Homo Sapiens
gccacucucuucccuuuccccagcaucacucc

SEQ ID NO: 419880 - RNA, 32 nt, Homo Sapiens
cgcugcgcccauuccugccgccggcgauguaa

SEQ ID NO: 419881 - RNA, 32 nt, Homo Sapiens
acucucaccuugcaccgugcaccaacccuuca

SEQ ID NO: 419882 - RNA, 32 nt, Homo Sapiens
ccgggcgcucagguuggucuggaccggaagcg

SEQ ID NO: 419883 - RNA, 32 nt, Homo Sapiens
uggcuuguaugcuuguccuguggugacaguuu

SEQ ID NO: 419884 - RNA, 32 nt, Homo Sapiens
caggcgucucagcagcagcugccaccugcaug

SEQ ID NO: 419885 - RNA, 32 nt, Homo Sapiens
auuuugugcaauauuucugugauugugccuau

SEQ ID NO: 419886 - RNA, 32 nt, Homo Sapiens
cggcgggcgagggguccgggcugagcugcggg

SEQ ID NO: 419887 - RNA, 32 nt, Homo Sapiens
gagcgggagcugcgcgagcggcugcugagcau

SEQ ID NO: 419888 - RNA, 32 nt, Homo Sapiens
gucccagccaaggcuuccuuccucucacucgg

SEQ ID NO: 419889 - RNA, 32 nt, Homo Sapiens
uuuuacuuacacuuuggcucauuuuuaaacca

SEQ ID NO: 419890 - RNA, 32 nt, Homo Sapiens
ucagacuuuaaaaaauaccagcacugcuauuc

SEQ ID NO: 419891 - RNA, 32 nt, Homo Sapiens
caacucaugccuuaauuuuguauuuugaaugu

SEQ ID NO: 419892 - RNA, 32 nt, Homo Sapiens
ugugaugguauuuggagguggggcuuuuggga

SEQ ID NO: 419893 - RNA, 32 nt, Homo Sapiens
aaugguugaaauucauuguuacaggauuuaac

SEQ ID NO: 419894 - RNA, 29 nt, Homo Sapiens
ccaggaauguguauguauaacauguggag

SEQ ID NO: 419895 - RNA, 32 nt, Homo Sapiens
ccaaccuuuccacagaguccacacaucacuuc

SEQ ID NO: 419896 - RNA, 32 nt, Homo Sapiens
cugcgugggcagccgacacacccaccccagca

SEQ ID NO: 419897 - RNA, 32 nt, Homo Sapiens
gaugcucagugaucgccuccaacagcaucauc

SEQ ID NO: 419898 - RNA, 32 nt, Homo Sapiens
uagagugggaaaaaagcagaggccagggcgcc

SEQ ID NO: 419899 - RNA, 32 nt, Homo Sapiens
guugucugaaaggugugguuuuauugaauguc

SEQ ID NO: 419900 - RNA, 32 nt, Homo Sapiens
uccuagaccaggacuuccugugugacccugga

SEQ ID NO: 419901 - RNA, 32 nt, Homo Sapiens
augacauuuuuaggguugaguaauuguuguga

SEQ ID NO: 419902 - RNA, 32 nt, Homo Sapiens
aaaaacaaaagcaaauuuauauacuaaaauca

SEQ ID NO: 419903 - RNA, 29 nt, Homo Sapiens
uagggacagggacagagagacgccucuag

SEQ ID NO: 419904 - RNA, 32 nt, Homo Sapiens
cuggaguuuguggcagggcuuuugggauuaag

SEQ ID NO: 419905 - RNA, 31 nt, Homo Sapiens
ugcacccuggcgagcuuaccaagggccugga

SEQ ID NO: 419906 - RNA, 32 nt, Homo Sapiens
aggcucacagguggcacacaggcgcugucucu

SEQ ID NO: 419907 - RNA, 29 nt, Homo Sapiens
uucuucgggagucucaguuguaaaaccuu

SEQ ID NO: 419908 - RNA, 32 nt, Homo Sapiens
ccccugcuaaggaguucucaucccucugucag

SEQ ID NO: 419909 - RNA, 32 nt, Homo Sapiens
aagcaccugcgcgucccggcccggccccgggc

SEQ ID NO: 419910 - RNA, 32 nt, Homo Sapiens
aaaagaaagaauacuuuuuuauaccucacuau

SEQ ID NO: 419911 - RNA, 32 nt, Homo Sapiens
uuuuauguguguguaauuuguaaaugcugaaa

SEQ ID NO: 419912 - RNA, 32 nt, Homo Sapiens
agccgggcgcgguggcgggcaccuguaguccc

SEQ ID NO: 419913 - RNA, 32 nt, Homo Sapiens
gagaagcucugcaagagaccugugcaagggcg

SEQ ID NO: 419914 - RNA, 32 nt, Homo Sapiens
aacuuucagggaagaaggagggaauaggcaag

SEQ ID NO: 419915 - RNA, 32 nt, Homo Sapiens
agguagcccccucucccguccucaugcucccu

SEQ ID NO: 419916 - RNA, 32 nt, Homo Sapiens
aauuacuuuuuuccaauuuuagaaaaucaagc

SEQ ID NO: 419917 - RNA, 32 nt, Homo Sapiens
gacuagguaauuacacagaggcuugaaauguu

SEQ ID NO: 419918 - RNA, 32 nt, Homo Sapiens
uugcuugaugauaaguuuuugcuugcucauau

SEQ ID NO: 419919 - RNA, 32 nt, Homo Sapiens
aaccgcagccccagcccagccugccuguccuc

SEQ ID NO: 419920 - RNA, 32 nt, Homo Sapiens
ucuuaaggucauaaaaauauuguuauguggga

SEQ ID NO: 419921 - RNA, 28 nt, Homo Sapiens
uucgcaaaagauuaaaguugaauuuuac

SEQ ID NO: 419922 - RNA, 32 nt, Homo Sapiens
cugccccaaggccccagggacagaggccaagg

SEQ ID NO: 419923 - RNA, 32 nt, Homo Sapiens
uggaagaacaaaugugugcauucacccccagu

SEQ ID NO: 419924 - RNA, 32 nt, Homo Sapiens
cuuccccucccacacaaaccagccaguaaaga

SEQ ID NO: 419925 - RNA, 32 nt, Homo Sapiens
ucugcaugcccaccaucaagguaugaggaugg

SEQ ID NO: 419926 - RNA, 32 nt, Homo Sapiens
ugaaaaggagaugccuugggguucgugcacaa

SEQ ID NO: 419927 - RNA, 32 nt, Homo Sapiens
cucacugugggaagagaagaggggaguauccu

SEQ ID NO: 419928 - RNA, 32 nt, Homo Sapiens
gcacuaugauucaagaaauacauuucaugggg

SEQ ID NO: 419929 - RNA, 32 nt, Homo Sapiens
accaagaggagcuccuuccugucggugccuca

SEQ ID NO: 419930 - RNA, 32 nt, Homo Sapiens
aguuuaucuguaaauauaauuuauugaggccu

SEQ ID NO: 419931 - RNA, 32 nt, Homo Sapiens
ucagugcaucgaguucuguuuccguggaaaau

SEQ ID NO: 419932 - RNA, 32 nt, Homo Sapiens
ggacucggagccgcgagcggcccgagaugagc

SEQ ID NO: 419933 - RNA, 32 nt, Homo Sapiens
gaaagcaccaacauauucagccaggcagugug

SEQ ID NO: 419934 - RNA, 32 nt, Homo Sapiens
gaagucucauguggaauuguaguaaucuccag

SEQ ID NO: 419935 - RNA, 32 nt, Homo Sapiens
ggaacuuucuauuugccagaaugaccuacacu

SEQ ID NO: 419936 - RNA, 32 nt, Homo Sapiens
auccugggacagggcacagggccaucugucac

SEQ ID NO: 419937 - RNA, 32 nt, Homo Sapiens
uuggggaaggaagaugauacuucuuucucaag

SEQ ID NO: 419938 - RNA, 32 nt, Homo Sapiens
uucaggacccugcuucugagugacggaccagc

SEQ ID NO: 419939 - RNA, 32 nt, Homo Sapiens
ggugauggggacgauucugcccaguguccuca

SEQ ID NO: 419940 - RNA, 32 nt, Homo Sapiens
ucuguaaaagugaaauaaaauaacuuuccguu

SEQ ID NO: 419941 - RNA, 30 nt, Homo Sapiens
cuagcucaaaauaaucuugaaauacacauu

SEQ ID NO: 419942 - RNA, 32 nt, Homo Sapiens
ccuguggccccggcucuucacagcaggcagaa

SEQ ID NO: 419943 - RNA, 32 nt, Homo Sapiens
agaaauggggcaaugugggaggucaugggggc

SEQ ID NO: 419944 - RNA, 32 nt, Homo Sapiens
augggagauggcaacagucccugucacuggaa

SEQ ID NO: 419945 - RNA, 32 nt, Homo Sapiens
uguccccaccgccuccccuuucucucuggaaa

SEQ ID NO: 419946 - RNA, 32 nt, Homo Sapiens
aagaggaggaggaggcuguggaugacacacug

SEQ ID NO: 419947 - RNA, 32 nt, Homo Sapiens
ccuagggugggaaggggcuagggaggaccaaa

SEQ ID NO: 419948 - RNA, 32 nt, Homo Sapiens
gucucucugugcugaggccuggacccugugcu

SEQ ID NO: 419949 - RNA, 32 nt, Homo Sapiens
agcagccguugggagcccaggaggcggggcgc

SEQ ID NO: 419950 - RNA, 32 nt, Homo Sapiens
gugguugugucugcuuuaaagggccugccugg

SEQ ID NO: 419951 - RNA, 32 nt, Homo Sapiens
aaaaguagacauucucuuuuuccucuuuuagg

SEQ ID NO: 419952 - RNA, 32 nt, Homo Sapiens
acccccucuuguaaacccggcgccaggcacag

SEQ ID NO: 419953 - RNA, 32 nt, Homo Sapiens
uaagccccaaccccacuccacuccuguggcca

SEQ ID NO: 419954 - RNA, 32 nt, Homo Sapiens
uuuaaucauggaauaaucuuauguauuggugu

SEQ ID NO: 419955 - RNA, 30 nt, Homo Sapiens
agcugaggcaggccacccagguccugcagg

SEQ ID NO: 419956 - RNA, 32 nt, Homo Sapiens
agugaucuccgagauagcacacaagcgcauuu

SEQ ID NO: 419957 - RNA, 32 nt, Homo Sapiens
gguuggagcgaauggaaguugggugauuuuaa

SEQ ID NO: 419958 - RNA, 32 nt, Homo Sapiens
cgcagccauggagggaggcggcggcggcggcg

SEQ ID NO: 419959 - RNA, 32 nt, Homo Sapiens
gggauauaaaaauaaugucauagguaagaaac

SEQ ID NO: 419960 - RNA, 32 nt, Homo Sapiens
gacacucuuccaggggacccaaggggucacuc

SEQ ID NO: 419961 - RNA, 32 nt, Homo Sapiens
ccgguuuggggaugugguccuugcugcucugc

SEQ ID NO: 419962 - RNA, 32 nt, Homo Sapiens
cccaggggugcucccggugcugccugcagggc

SEQ ID NO: 419963 - RNA, 32 nt, Homo Sapiens
aagugggagaggacugagagugaggcaaguuc

SEQ ID NO: 419964 - RNA, 29 nt, Homo Sapiens
cacuacauauguauguaugauauauucau

SEQ ID NO: 419965 - RNA, 32 nt, Homo Sapiens
aaucacaguuuuuaaccuguguuugucugccc

SEQ ID NO: 419966 - RNA, 32 nt, Homo Sapiens
auauuuaguagaaaugaugcuucugcucagga

SEQ ID NO: 419967 - RNA, 32 nt, Homo Sapiens
cuccgcuccgcgggcggacucggcucggcucu

SEQ ID NO: 419968 - RNA, 32 nt, Homo Sapiens
uuagcaacuauuuuuccaacuauuuucaacua

SEQ ID NO: 419969 - RNA, 32 nt, Homo Sapiens
uccuaguggaggagggaaggaugcaggcacag

SEQ ID NO: 419970 - RNA, 32 nt, Homo Sapiens
cacgugaugucggucccccaucgccugcugag

SEQ ID NO: 419971 - RNA, 32 nt, Homo Sapiens
auauuaacugucaguauuuugggggcauuagg

SEQ ID NO: 419972 - RNA, 32 nt, Homo Sapiens
uuauggcauuuuuaagaucauggcauuuuaau

SEQ ID NO: 419973 - RNA, 32 nt, Homo Sapiens
ggggauggucacauuuaccauguauuguguua

SEQ ID NO: 419974 - RNA, 32 nt, Homo Sapiens
gagauuuuuaucauaccuccagcagaguaagg

SEQ ID NO: 419975 - RNA, 32 nt, Homo Sapiens
acuccucuuucuagacacuuccaaauagagau

SEQ ID NO: 419976 - RNA, 32 nt, Homo Sapiens
ccucuguucucugcgcauuucagacacagccu

SEQ ID NO: 419977 - RNA, 32 nt, Homo Sapiens
uuagcucuggaaagaauaaggcugccuuggag

SEQ ID NO: 419978 - RNA, 27 nt, Homo Sapiens
ugugaucacuucuucagaccucccuug

SEQ ID NO: 419979 - RNA, 32 nt, Homo Sapiens
gccccagcggggaggaggagcaaggacaugua

SEQ ID NO: 419980 - RNA, 32 nt, Homo Sapiens
agcagccugugcuagggaccagagcaccgggg

SEQ ID NO: 419981 - RNA, 32 nt, Homo Sapiens
uuuuaauuguuguuucuuucuaguggucuuug

SEQ ID NO: 419982 - RNA, 29 nt, Homo Sapiens
uuuauacuuuggccauaccacagagcuag

SEQ ID NO: 419983 - RNA, 32 nt, Homo Sapiens
ucccagcccacuuugcugugucucuggcgggc

SEQ ID NO: 419984 - RNA, 32 nt, Homo Sapiens
aguuggaggauacagugagccaugaucacacc

SEQ ID NO: 419985 - RNA, 32 nt, Homo Sapiens
uucucauaguugugucccaauuaaccaaaaag

SEQ ID NO: 419986 - RNA, 32 nt, Homo Sapiens
uccugaaagccuaagauugaccacaccagagg

SEQ ID NO: 419987 - RNA, 32 nt, Homo Sapiens
gcaaugcuaugugucugggaguaagcaaaauu

SEQ ID NO: 419988 - RNA, 32 nt, Homo Sapiens
aucaaucucccaaagccaaguuuaccugcugu

SEQ ID NO: 419989 - RNA, 32 nt, Homo Sapiens
uggggcaugggagaggaguaggagauggggcc

SEQ ID NO: 419990 - RNA, 32 nt, Homo Sapiens
caccuguagucccagcacuuuaggaggcugag

SEQ ID NO: 419991 - RNA, 32 nt, Homo Sapiens
cuaugcuauuauuaaaauaaaauauuuacugu

SEQ ID NO: 419992 - RNA, 32 nt, Homo Sapiens
acgaagaaaaagauucagggagaguaagagga

SEQ ID NO: 419993 - RNA, 32 nt, Homo Sapiens
auuuugggucauuuaauuuaagaaugagaguc

SEQ ID NO: 419994 - RNA, 32 nt, Homo Sapiens
gggcagaaccugagcccucccagugcuugccu

SEQ ID NO: 419995 - RNA, 32 nt, Homo Sapiens
ggugccuuuggggaaaauuaacuuuuucuuuu

SEQ ID NO: 419996 - RNA, 32 nt, Homo Sapiens
cugugaugccugcagagcuguggcuuaccaga

SEQ ID NO: 419997 - RNA, 32 nt, Homo Sapiens
uccccgaggcgcagacccggcucuggcgcccc

SEQ ID NO: 419998 - RNA, 32 nt, Homo Sapiens
agcccauccugccugcccugagugggagggca

SEQ ID NO: 419999 - RNA, 32 nt, Homo Sapiens
gucuguuugccuguugcucaccauagacauaa

SEQ ID NO: 420000 - RNA, 32 nt, Homo Sapiens
gguaacucugcaugaacggacuggauaguaaa

SEQ ID NO: 420001 - RNA, 32 nt, Homo Sapiens
uacuugcuuuuuccuuugaguggauuccccau

SEQ ID NO: 420002 - RNA, 32 nt, Homo Sapiens
ccaagcaauuaauuuuuuguucgucgucguuu

SEQ ID NO: 420003 - RNA, 32 nt, Homo Sapiens
ggacaggcgggugugaggaguugcagacccaa

SEQ ID NO: 420004 - RNA, 32 nt, Homo Sapiens
uaaaauauauuccugagauuuccuccuggccu

SEQ ID NO: 420005 - RNA, 31 nt, Homo Sapiens
uccuaaugagauucucucagaggaugauuau

SEQ ID NO: 420006 - RNA, 32 nt, Homo Sapiens
gacacauggccccucccccugccaggagcuuu

SEQ ID NO: 420007 - RNA, 27 nt, Homo Sapiens
aaccuuucugucuucagccucugcuau

SEQ ID NO: 420008 - RNA, 32 nt, Homo Sapiens
ccacuacccuucuccuuuccuucccaggcccu

SEQ ID NO: 420009 - RNA, 31 nt, Homo Sapiens
gaggaggcgccccagaaggcgacgccucuug

SEQ ID NO: 420010 - RNA, 32 nt, Homo Sapiens
guugugcuuuuguagagagaugauuauuguac

SEQ ID NO: 420011 - RNA, 32 nt, Homo Sapiens
ggcacucugcuucugcccuuggcuggggaagg

SEQ ID NO: 420012 - RNA, 32 nt, Homo Sapiens
guauguaaugcacguuccugccugcagggagg

SEQ ID NO: 420013 - RNA, 32 nt, Homo Sapiens
agaaagauaaccuuaaccaggacacgaggaaa

SEQ ID NO: 420014 - RNA, 32 nt, Homo Sapiens
uggcugaggggagaggaaaacauggauuauuc

SEQ ID NO: 420015 - RNA, 32 nt, Homo Sapiens
cgggcuccgcgcagccgucuguccuugaucug

SEQ ID NO: 420016 - RNA, 32 nt, Homo Sapiens
uuaaucuagcauuugucuuuauacuuuauagu

SEQ ID NO: 420017 - RNA, 32 nt, Homo Sapiens
uuacaagauccauuugccuuucugggagcaga

SEQ ID NO: 420018 - RNA, 32 nt, Homo Sapiens
caguuuucacuuaaacaaccagcaagucuuga

SEQ ID NO: 420019 - RNA, 32 nt, Homo Sapiens
uuuguuuuuacaacaaauaaaauugaucuuga

SEQ ID NO: 420020 - RNA, 32 nt, Homo Sapiens
uuccuggaagcaggugcuacaacaugugaggc

SEQ ID NO: 420021 - RNA, 32 nt, Homo Sapiens
ggugggggcacgcuuccucuuccuucucuccc

SEQ ID NO: 420022 - RNA, 32 nt, Homo Sapiens
gcacugaggauuucuuuuugguuugccuuuua

SEQ ID NO: 420023 - RNA, 32 nt, Homo Sapiens
caugagugccagcagcugcugccuuccauucc

SEQ ID NO: 420024 - RNA, 32 nt, Homo Sapiens
uguggcaaagcuuuuaaccaguccucaacccu

SEQ ID NO: 420025 - RNA, 32 nt, Homo Sapiens
uuuauuucuuuuuuuucuuuugcuuuaaauca

SEQ ID NO: 420026 - RNA, 32 nt, Homo Sapiens
cggaccggcagccgagugacagugcguggucc

SEQ ID NO: 420027 - RNA, 32 nt, Homo Sapiens
cacuuggacuuacagcguucgaaacaaucaua

SEQ ID NO: 420028 - RNA, 32 nt, Homo Sapiens
gcaauagugaaguguaggauauugaucuccag

SEQ ID NO: 420029 - RNA, 32 nt, Homo Sapiens
aggaaauguguggcuuuuguuuuguauuuuuu

SEQ ID NO: 420030 - RNA, 32 nt, Homo Sapiens
ugcccaggaaccucagggcuguguguacuaau

SEQ ID NO: 420031 - RNA, 32 nt, Homo Sapiens
ugggggaugacuagaggcagggaggggacuau

SEQ ID NO: 420032 - RNA, 32 nt, Homo Sapiens
gccugaucacugggcucaggucagggcuuggu

SEQ ID NO: 420033 - RNA, 32 nt, Homo Sapiens
gggauaauaauuuaauuguucuagacaagggg

SEQ ID NO: 420034 - RNA, 31 nt, Homo Sapiens
guggcacugccauugccgccuccugccacca

SEQ ID NO: 420035 - RNA, 32 nt, Homo Sapiens
uggaggaucugcaaugcuggaacuugccggug

SEQ ID NO: 420036 - RNA, 32 nt, Homo Sapiens
ucucuuucugccuagcugucucuucucaccca

SEQ ID NO: 420037 - RNA, 23 nt, Homo Sapiens
gucgccccgcaugcgccacaucu

SEQ ID NO: 420038 - RNA, 32 nt, Homo Sapiens
ggucauaucuguuuuucuuuaucauucauuuc

SEQ ID NO: 420039 - RNA, 32 nt, Homo Sapiens
gccaaauuacuggaccuaaacuucugggagcc

SEQ ID NO: 420040 - RNA, 32 nt, Homo Sapiens
cccaaaaaccucuggugggagauaggaagaua

SEQ ID NO: 420041 - RNA, 32 nt, Homo Sapiens
gggugugggccuggaggaagguccuggggcgu

SEQ ID NO: 420042 - RNA, 32 nt, Homo Sapiens
uaaguugagauuuuuuuuuuuaauagcaagaa

SEQ ID NO: 420043 - RNA, 32 nt, Homo Sapiens
ccgucaccaaccccaucucguucgcccgcaag

SEQ ID NO: 420044 - RNA, 32 nt, Homo Sapiens
ucgcugugugugcguuuguccucugcugccau

SEQ ID NO: 420045 - RNA, 32 nt, Homo Sapiens
ccagguuccgccugucguggguucgcaccccg

SEQ ID NO: 420046 - RNA, 32 nt, Homo Sapiens
guauuaacuggagucuuaauccuaaauuugga

SEQ ID NO: 420047 - RNA, 32 nt, Homo Sapiens
uguauuugcaggcuuuucugaauaccaaaucu

SEQ ID NO: 420048 - RNA, 32 nt, Homo Sapiens
cccccaagcaaagcuuccuguuuggaacacag

SEQ ID NO: 420049 - RNA, 32 nt, Homo Sapiens
uugaaauccaaauggaugagcauggaugaauu

SEQ ID NO: 420050 - RNA, 30 nt, Homo Sapiens
cccugccuggccaguggggaaacaccgguc

SEQ ID NO: 420051 - RNA, 32 nt, Homo Sapiens
ggaagcggaaggggagagcggcccggccuggg

SEQ ID NO: 420052 - RNA, 32 nt, Homo Sapiens
ucuggggaaggggugcaugucacauggaaauu

SEQ ID NO: 420053 - RNA, 32 nt, Homo Sapiens
auuuacagaaaagacucugaccagagaucgag

SEQ ID NO: 420054 - RNA, 32 nt, Homo Sapiens
gagcagaggggaaaugucuagacaguaccaau

SEQ ID NO: 420055 - RNA, 32 nt, Homo Sapiens
agcugcagccucuuuccucguuucuagucuca

SEQ ID NO: 420056 - RNA, 32 nt, Homo Sapiens
agaaauuguucccuuccccuguguucaauguu

SEQ ID NO: 420057 - RNA, 32 nt, Homo Sapiens
aaggguuaagucuauuugaaaagguuaaaaaa

SEQ ID NO: 420058 - RNA, 32 nt, Homo Sapiens
ugaguuaauuuauguaagucauauuuauauuu

SEQ ID NO: 420059 - RNA, 32 nt, Homo Sapiens
accuucagccagcuccggcccgcggcucccgg

SEQ ID NO: 420060 - RNA, 32 nt, Homo Sapiens
auaacauggaagaagauuuagagcucugcagc

SEQ ID NO: 420061 - RNA, 32 nt, Homo Sapiens
ucccugccucgaaacuugcaagucacuugucu

SEQ ID NO: 420062 - RNA, 32 nt, Homo Sapiens
acaauuuuuuaaaaauauaagcucacaugccu

SEQ ID NO: 420063 - RNA, 32 nt, Homo Sapiens
gggccgaggucuuugagcucaggaguucaaga

SEQ ID NO: 420064 - RNA, 27 nt, Homo Sapiens
agccuaagucucuucagccaccuccca

SEQ ID NO: 420065 - RNA, 32 nt, Homo Sapiens
cauccaugcuuucagagggacuugcggccacg

SEQ ID NO: 420066 - RNA, 32 nt, Homo Sapiens
ccagaacgaucgccgcggccggaagaguuggc

SEQ ID NO: 420067 - RNA, 32 nt, Homo Sapiens
ggcaguaacaaccuucugaggaccaggaaauu

SEQ ID NO: 420068 - RNA, 32 nt, Homo Sapiens
gccgcgauuccuucgggcgaugcugggggcuu

SEQ ID NO: 420069 - RNA, 32 nt, Homo Sapiens
ucagggcugcugccuuccuguccucuggagag

SEQ ID NO: 420070 - RNA, 32 nt, Homo Sapiens
aagggagggaauaaauacuuuuuucugugucc

SEQ ID NO: 420071 - RNA, 32 nt, Homo Sapiens
cuugcuaaacauaagauaauucauauuggaga

SEQ ID NO: 420072 - RNA, 32 nt, Homo Sapiens
acagcugcgagcccggccccugcuguucucag

SEQ ID NO: 420073 - RNA, 32 nt, Homo Sapiens
auuggccccucuaggagugacccuagugacuu

SEQ ID NO: 420074 - RNA, 32 nt, Homo Sapiens
ugcaaauaagggaagggaaaaaugcuuuucua

SEQ ID NO: 420075 - RNA, 32 nt, Homo Sapiens
ugcuggccgcggugguggaggcguucuuauac

SEQ ID NO: 420076 - RNA, 32 nt, Homo Sapiens
agcagcaaccucagggcuugucuauguggguu

SEQ ID NO: 420077 - RNA, 29 nt, Homo Sapiens
cagauuaaaaauuuauguauuuguguucu

SEQ ID NO: 420078 - RNA, 32 nt, Homo Sapiens
gggcugccauguggcucugugccuucucaaac

SEQ ID NO: 420079 - RNA, 32 nt, Homo Sapiens
uuuuccuguuggggggagggcccgccagugac

SEQ ID NO: 420080 - RNA, 32 nt, Homo Sapiens
auauuuucugguguagggucuuucuuauuuag

SEQ ID NO: 420081 - RNA, 32 nt, Homo Sapiens
ugauauugaagaaaaauaaguaacuguauuag

SEQ ID NO: 420082 - RNA, 32 nt, Homo Sapiens
accuagaagucugcuuuuguaccugcugggcc

SEQ ID NO: 420083 - RNA, 32 nt, Homo Sapiens
ccugggccgcccccggcccagcccugccuugc

SEQ ID NO: 420084 - RNA, 32 nt, Homo Sapiens
uaauucaccuuuuuauacaucuguaaauaaau

SEQ ID NO: 420085 - RNA, 32 nt, Homo Sapiens
caaauccaccaauugacgagaagaaugccacc

SEQ ID NO: 420086 - RNA, 32 nt, Homo Sapiens
cugucagcacucacucccucccggccccucac

SEQ ID NO: 420087 - RNA, 32 nt, Homo Sapiens
uaaauaugaaacuuuuuaaaucugauuuucuu

SEQ ID NO: 420088 - RNA, 32 nt, Homo Sapiens
guaaaauggaaauuuuucacuuauuugcaauu

SEQ ID NO: 420089 - RNA, 32 nt, Homo Sapiens
gaucugcaguaaggugguuuaaaccauaguua

SEQ ID NO: 420090 - RNA, 32 nt, Homo Sapiens
ccccgggacgcgcggcugcugcugcuccugcc

SEQ ID NO: 420091 - RNA, 32 nt, Homo Sapiens
guaggagaaagagacgcaaacacaaaagugga

SEQ ID NO: 420092 - RNA, 32 nt, Homo Sapiens
cuagugauauugugaccauuuacaguaauuuc

SEQ ID NO: 420093 - RNA, 32 nt, Homo Sapiens
guuuacaauuuaugcacuguuaauuugccuaa

SEQ ID NO: 420094 - RNA, 32 nt, Homo Sapiens
ucuguguuugguuuuuauucuuaucauuauua

SEQ ID NO: 420095 - RNA, 32 nt, Homo Sapiens
guagguauaggaggucaagaaaaggaguucgg

SEQ ID NO: 420096 - RNA, 32 nt, Homo Sapiens
ugccuuuggggacuuuucuuaaaccuucaguu

SEQ ID NO: 420097 - RNA, 32 nt, Homo Sapiens
caagaaauaagaaucagaaagaaggacacacc

SEQ ID NO: 420098 - RNA, 32 nt, Homo Sapiens
uauaagcauaaugucagaauuaauuugaacaa

SEQ ID NO: 420099 - RNA, 32 nt, Homo Sapiens
accuccacggacagcaaagugguuuuaaugca

SEQ ID NO: 420100 - RNA, 32 nt, Homo Sapiens
cucacucgcccauuugacagauggagaaacug

SEQ ID NO: 420101 - RNA, 32 nt, Homo Sapiens
aggccucacugcaccuuuccguguggagccca

SEQ ID NO: 420102 - RNA, 32 nt, Homo Sapiens
auaacugcagugucuuguuuuguuuuaaauuc

SEQ ID NO: 420103 - RNA, 32 nt, Homo Sapiens
ccaauaacuucagagaagucaguuggagaaaa

SEQ ID NO: 420104 - RNA, 32 nt, Homo Sapiens
agcacgacucgcguagccgugcgccgauugcc

SEQ ID NO: 420105 - RNA, 32 nt, Homo Sapiens
agcccgcggcgguaccugcagcggaggagcuc

SEQ ID NO: 420106 - RNA, 32 nt, Homo Sapiens
uuaagagaacagagcuacguucuuugugagag

SEQ ID NO: 420107 - RNA, 32 nt, Homo Sapiens
agucagcuacucacccgcuauuagaguaugga

SEQ ID NO: 420108 - RNA, 32 nt, Homo Sapiens
auuuuagucuugauguggaacuguaggagcag

SEQ ID NO: 420109 - RNA, 32 nt, Homo Sapiens
uauuaaauaugauagcauuaucccuguaugac

SEQ ID NO: 420110 - RNA, 32 nt, Homo Sapiens
gcugcugaugaaaauacucaguuuccugggca

SEQ ID NO: 420111 - RNA, 32 nt, Homo Sapiens
ucuggguuccagguaacuuccuuuaaaauaaa

SEQ ID NO: 420112 - RNA, 32 nt, Homo Sapiens
cagccagaggaguacggauuaaggggccgaag

SEQ ID NO: 420113 - RNA, 32 nt, Homo Sapiens
uugggugucuugucuuuuuugggcuuuuaguu

SEQ ID NO: 420114 - RNA, 32 nt, Homo Sapiens
cucagucugaaucuucuguucagaaucuuaca

SEQ ID NO: 420115 - RNA, 32 nt, Homo Sapiens
aacuucugggaaacccaaacuaagacacucuu

SEQ ID NO: 420116 - RNA, 32 nt, Homo Sapiens
aucacuucucaauaaaugugagauccuguuga

SEQ ID NO: 420117 - RNA, 32 nt, Homo Sapiens
gugccugggguguaaugagcuccugcucauug

SEQ ID NO: 420118 - RNA, 32 nt, Homo Sapiens
uagcgauggcuucugcucucaacagcaaaauu

SEQ ID NO: 420119 - RNA, 32 nt, Homo Sapiens
cucccuggugagagggccgggcagaggggcag

SEQ ID NO: 420120 - RNA, 32 nt, Homo Sapiens
ugcuccuucacgggagggcagggagguucaac

SEQ ID NO: 420121 - RNA, 32 nt, Homo Sapiens
aggcccugcacgccugcccccuugggugaccu

SEQ ID NO: 420122 - RNA, 32 nt, Homo Sapiens
gauaauuguugauaguugacuuagcagguccc

SEQ ID NO: 420123 - RNA, 32 nt, Homo Sapiens
ggggcggcgggggacaucggagggcagcggag

SEQ ID NO: 420124 - RNA, 32 nt, Homo Sapiens
ccuccaaacccucccaggauucaaagcuaggu

SEQ ID NO: 420125 - RNA, 32 nt, Homo Sapiens
ucgguugcaggcguuggugccucugucagcgu

SEQ ID NO: 420126 - RNA, 32 nt, Homo Sapiens
auauaaaaagcuuguuucuacaguuugcagug

SEQ ID NO: 420127 - RNA, 32 nt, Homo Sapiens
auguuagggucacuguugguggcugccccagu

SEQ ID NO: 420128 - RNA, 32 nt, Homo Sapiens
gcauccgagcagcgcaggauccagguuuccug

SEQ ID NO: 420129 - RNA, 31 nt, Homo Sapiens
ccagggcucaccaccaccugcgugaucuggc

SEQ ID NO: 420130 - RNA, 31 nt, Homo Sapiens
aacagcuuugaaggucucagaguuugcuuuu

SEQ ID NO: 420131 - RNA, 32 nt, Homo Sapiens
uggaauguauaaaaauggaugaaaagcaauag

SEQ ID NO: 420132 - RNA, 32 nt, Homo Sapiens
ccucucgugcugcucaguuuguccucugcucc

SEQ ID NO: 420133 - RNA, 32 nt, Homo Sapiens
guaaccuguuacuauuuggagagagaagcagu

SEQ ID NO: 420134 - RNA, 32 nt, Homo Sapiens
gagcaccccaugaagggaccgcccccucccaa

SEQ ID NO: 420135 - RNA, 32 nt, Homo Sapiens
cagguuuuccauuuuaguggguucugcuuuua

SEQ ID NO: 420136 - RNA, 32 nt, Homo Sapiens
ugucacuugaugcuuaugggccugcugaggcc

SEQ ID NO: 420137 - RNA, 32 nt, Homo Sapiens
ugauuaggaugguuaggagcaugaugacuuug

SEQ ID NO: 420138 - RNA, 32 nt, Homo Sapiens
guuaauaccagcuuuuuccaauaaaauaacaa

SEQ ID NO: 420139 - RNA, 28 nt, Homo Sapiens
uucuuuguuaugaacauuaugaaaacca

SEQ ID NO: 420140 - RNA, 32 nt, Homo Sapiens
gcugcaauauuuuuaugcaaccucugugccag

SEQ ID NO: 420141 - RNA, 32 nt, Homo Sapiens
gugccugguggaacuguccacccagccggcca

SEQ ID NO: 420142 - RNA, 32 nt, Homo Sapiens
uccucucuccucagggaggcaagcauuugaug

SEQ ID NO: 420143 - RNA, 32 nt, Homo Sapiens
cuguucuucuucaugcuguugcugcuuggucu

SEQ ID NO: 420144 - RNA, 32 nt, Homo Sapiens
ccuuagccccacucuaagaaaucuauguuccu

SEQ ID NO: 420145 - RNA, 32 nt, Homo Sapiens
cugcccgcuggccccaggaccugcacucccaa

SEQ ID NO: 420146 - RNA, 32 nt, Homo Sapiens
ccuggagagucacauguuugucugcauccuca

SEQ ID NO: 420147 - RNA, 28 nt, Homo Sapiens
uuuaggguggcuacgagguagaggggug

SEQ ID NO: 420148 - RNA, 32 nt, Homo Sapiens
cccaagugcgcgcgcugucgcaaccauggcgu

SEQ ID NO: 420149 - RNA, 32 nt, Homo Sapiens
uggccuggggcagcugcaggagcgcugcgugg

SEQ ID NO: 420150 - RNA, 32 nt, Homo Sapiens
gguggcgggauggggcugcugcucaugauccu

SEQ ID NO: 420151 - RNA, 32 nt, Homo Sapiens
cauuugcuaccuguaguagccugccucuuaac

SEQ ID NO: 420152 - RNA, 32 nt, Homo Sapiens
cuaguaacagagcuaauacagaauaguaaucc

SEQ ID NO: 420153 - RNA, 32 nt, Homo Sapiens
guugcaaacaauuuaauguuuuaagcacuaga

SEQ ID NO: 420154 - RNA, 32 nt, Homo Sapiens
cacugaagcccccaauucccacagcuuuucca

SEQ ID NO: 420155 - RNA, 32 nt, Homo Sapiens
cccacagcgggaagcggccgccgcccgggccu

SEQ ID NO: 420156 - RNA, 32 nt, Homo Sapiens
aaccaagucccuuaauuuuagaguauaucuuu

SEQ ID NO: 420157 - RNA, 32 nt, Homo Sapiens
gguauaggaaaugcugaugacuucuuuaaugc

SEQ ID NO: 420158 - RNA, 32 nt, Homo Sapiens
ugaaggauaucaauauacuaaguuuuaacaga

SEQ ID NO: 420159 - RNA, 32 nt, Homo Sapiens
aaacucuguuucucuucagugcuccauuuuuu

SEQ ID NO: 420160 - RNA, 32 nt, Homo Sapiens
ggcugcguuuucggcgggccucccggguacaa

SEQ ID NO: 420161 - RNA, 32 nt, Homo Sapiens
uacauauaucuaaaccugaaaaaugaauugau

SEQ ID NO: 420162 - RNA, 32 nt, Homo Sapiens
ccucuucccgguggcaccucuccaccuguacc

SEQ ID NO: 420163 - RNA, 32 nt, Homo Sapiens
ggagugagccgcugcgcccggcccuggaugcc

SEQ ID NO: 420164 - RNA, 32 nt, Homo Sapiens
uauaugucugcuucuucaguccacacucauua

SEQ ID NO: 420165 - RNA, 32 nt, Homo Sapiens
cuuuguuuucuuuuuagauuuuguacauucca

SEQ ID NO: 420166 - RNA, 31 nt, Homo Sapiens
ugcugcgggcgcagccgacaucagcacccua

SEQ ID NO: 420167 - RNA, 32 nt, Homo Sapiens
ggugccugggagcggcuggcgcggcggaaucc

SEQ ID NO: 420168 - RNA, 32 nt, Homo Sapiens
ggaguggggugacggcuggaccccaagaggcc

SEQ ID NO: 420169 - RNA, 29 nt, Homo Sapiens
uucaaagcuugugagugaagcugcagaau

SEQ ID NO: 420170 - RNA, 32 nt, Homo Sapiens
ggcggcggaagcagaagcuggcaucuccccag

SEQ ID NO: 420171 - RNA, 32 nt, Homo Sapiens
auauucuagcucagcuuuacucuucuuccaca

SEQ ID NO: 420172 - RNA, 32 nt, Homo Sapiens
uuuacagagucuuguaaucacuuugccaccgu

SEQ ID NO: 420173 - RNA, 32 nt, Homo Sapiens
cagaaaaggaaagagggaaggcccugggaugg

SEQ ID NO: 420174 - RNA, 32 nt, Homo Sapiens
caacaaagaccacuucccaguccuccagggcg

SEQ ID NO: 420175 - RNA, 32 nt, Homo Sapiens
ccagccgcugccgucuccgucucggugucccg

SEQ ID NO: 420176 - RNA, 32 nt, Homo Sapiens
ugcagcgacugcccggcccucccuccccugcc

SEQ ID NO: 420177 - RNA, 32 nt, Homo Sapiens
aggaguugaugcuuguccuguguugugaggcu

SEQ ID NO: 420178 - RNA, 32 nt, Homo Sapiens
ggcuuuuguuuccauugcuuuugguguuuuag

SEQ ID NO: 420179 - RNA, 32 nt, Homo Sapiens
uggacacccgcggcggcgagcugagggagcag

SEQ ID NO: 420180 - RNA, 31 nt, Homo Sapiens
ccgagcugaagcagaggcugaguuagggggc

SEQ ID NO: 420181 - RNA, 29 nt, Homo Sapiens
aucuuuuaguguuucagauaaccucucaa

SEQ ID NO: 420182 - RNA, 32 nt, Homo Sapiens
gcuuugaagggucucccuccccugcccuuagc

SEQ ID NO: 420183 - RNA, 32 nt, Homo Sapiens
caccaggaaacggcccggaucccggcagcggc

SEQ ID NO: 420184 - RNA, 32 nt, Homo Sapiens
aggccuccgcaugagcggagggccccccgcgc

SEQ ID NO: 420185 - RNA, 32 nt, Homo Sapiens
ugaauuugugccacuuuaauccuuccacuauc

SEQ ID NO: 420186 - RNA, 32 nt, Homo Sapiens
ccccgccaggaggccuggccugggcacacgca

SEQ ID NO: 420187 - RNA, 32 nt, Homo Sapiens
auucuuuggucgucguccucgguagcaagacc

SEQ ID NO: 420188 - RNA, 32 nt, Homo Sapiens
gaagcccccuccccagcccggaacugaccccu

SEQ ID NO: 420189 - RNA, 32 nt, Homo Sapiens
auaauuuucuaauuauuuucuuuugagauauu

SEQ ID NO: 420190 - RNA, 32 nt, Homo Sapiens
cauccccaccgccgccugucaucccucacguc

SEQ ID NO: 420191 - RNA, 31 nt, Homo Sapiens
aaccacaugggcauugcccagaauuacagga

SEQ ID NO: 420192 - RNA, 32 nt, Homo Sapiens
uggcucacaccugugagcacuuugggaggcug

SEQ ID NO: 420193 - RNA, 32 nt, Homo Sapiens
cagccaggaguaagaaaagaugguuagugaua

SEQ ID NO: 420194 - RNA, 32 nt, Homo Sapiens
caguucucguucaucugguugaucagcaugaa

SEQ ID NO: 420195 - RNA, 32 nt, Homo Sapiens
aacauaaaggauuaaaaucacacuaauaaccc

SEQ ID NO: 420196 - RNA, 32 nt, Homo Sapiens
aucuuucuuguuucuuguuuuuuccauuauau

SEQ ID NO: 420197 - RNA, 32 nt, Homo Sapiens
uucaacaguuuaggaugcaauuacgaguguaa

SEQ ID NO: 420198 - RNA, 32 nt, Homo Sapiens
aacuaccuggacuaaguaaccaauuaacuuuu

SEQ ID NO: 420199 - RNA, 32 nt, Homo Sapiens
uuacauuuuauauuuuuauacauauuguuagg

SEQ ID NO: 420200 - RNA, 32 nt, Homo Sapiens
ggcgggccgcguggagacgugaggcggccgcc

SEQ ID NO: 420201 - RNA, 32 nt, Homo Sapiens
uuguuacuacugaguuucuuaauaucugacug

SEQ ID NO: 420202 - RNA, 32 nt, Homo Sapiens
ggacgugcaucuguagcacuugguuccaucca

SEQ ID NO: 420203 - RNA, 31 nt, Homo Sapiens
uuuucggcgucgagacuggaggcugagugcu

SEQ ID NO: 420204 - RNA, 32 nt, Homo Sapiens
aggacacuagccugugcacgcgcgcgugcaca

SEQ ID NO: 420205 - RNA, 32 nt, Homo Sapiens
ugccaaaugcccucuuaucuagaauuuuuguu

SEQ ID NO: 420206 - RNA, 32 nt, Homo Sapiens
cuaucauucucccccaugacccgucuggaaau

SEQ ID NO: 420207 - RNA, 32 nt, Homo Sapiens
ugggacuugggguugaagccaccccuccuacu

SEQ ID NO: 420208 - RNA, 32 nt, Homo Sapiens
aaaagcugcaagaugccaaaaucuuguagaug

SEQ ID NO: 420209 - RNA, 32 nt, Homo Sapiens
cgcuaguauggacuuuuuggacagacuuaguu

SEQ ID NO: 420210 - RNA, 32 nt, Homo Sapiens
cugggggcugcugggagguggcugggaggcug

SEQ ID NO: 420211 - RNA, 32 nt, Homo Sapiens
ggggaggccagcugggaggggagggggccgug

SEQ ID NO: 420212 - RNA, 32 nt, Homo Sapiens
ucagaucccacuuuugccagacgcucauucag

SEQ ID NO: 420213 - RNA, 32 nt, Homo Sapiens
agaagcuugcugggcuuuguacccuggccaca

SEQ ID NO: 420214 - RNA, 32 nt, Homo Sapiens
uuauugccagugcauuuaguggcacccacucu

SEQ ID NO: 420215 - RNA, 29 nt, Homo Sapiens
gcuggguagggacagaggaggccgaaauc

SEQ ID NO: 420216 - RNA, 32 nt, Homo Sapiens
uaggugaguaauuuaauuuuguugagucagau

SEQ ID NO: 420217 - RNA, 32 nt, Homo Sapiens
aagguccuggcuccccuucucccggccuuccu

SEQ ID NO: 420218 - RNA, 30 nt, Homo Sapiens
ucagggaucuucggacccagcagaaggauc

SEQ ID NO: 420219 - RNA, 32 nt, Homo Sapiens
ggauguguagccuucuggaaucugcacgugac

SEQ ID NO: 420220 - RNA, 32 nt, Homo Sapiens
aaccccccagauaucaucuaccuagauuuaau

SEQ ID NO: 420221 - RNA, 32 nt, Homo Sapiens
acucaucauuuucuacuuguuuucaauguguu

SEQ ID NO: 420222 - RNA, 32 nt, Homo Sapiens
ccauuuuguaaauguuagacuuuuaucauacc

SEQ ID NO: 420223 - RNA, 32 nt, Homo Sapiens
cugugugccugugcccucugugccaccaggga

SEQ ID NO: 420224 - RNA, 32 nt, Homo Sapiens
uuugaaaauagggauuuaaaaaacuuuauaga

SEQ ID NO: 420225 - RNA, 32 nt, Homo Sapiens
uuuuguauggauuuuuuaaauguacauuuugg

SEQ ID NO: 420226 - RNA, 32 nt, Homo Sapiens
ggacgcgcgggccggcgcagccauggugaaga

SEQ ID NO: 420227 - RNA, 32 nt, Homo Sapiens
cuuaacagagggcaucauggaugcuggguggu

SEQ ID NO: 420228 - RNA, 32 nt, Homo Sapiens
gagacuauuuuuguuuugcgguggcagguagu

SEQ ID NO: 420229 - RNA, 32 nt, Homo Sapiens
gaagacugagaugagcuuggggcuuagccgag

SEQ ID NO: 420230 - RNA, 32 nt, Homo Sapiens
uuuuaauaaaauggcauauuuugcaucuacaa

SEQ ID NO: 420231 - RNA, 32 nt, Homo Sapiens
auuagaacucuugguggagggugcguacacac

SEQ ID NO: 420232 - RNA, 32 nt, Homo Sapiens
gggcacgagccaacaccccaccccucugccaa

SEQ ID NO: 420233 - RNA, 32 nt, Homo Sapiens
ggaguaacauaguggcuggccugguuauuuca

SEQ ID NO: 420234 - RNA, 32 nt, Homo Sapiens
uuaauaauuuugcggcagcggcugcgagaggc

SEQ ID NO: 420235 - RNA, 32 nt, Homo Sapiens
uuucuguaaaacuucuacaacuucugguguca

SEQ ID NO: 420236 - RNA, 32 nt, Homo Sapiens
ccgggagugucugggcgcucaguccgcucuga

SEQ ID NO: 420237 - RNA, 32 nt, Homo Sapiens
gugacucccucauaucuuuucccccuggcaug

SEQ ID NO: 420238 - RNA, 32 nt, Homo Sapiens
caaaugauauauauuucuucuaaggaaaaagu

SEQ ID NO: 420239 - RNA, 32 nt, Homo Sapiens
cuccgcaugcuugguucucccggagcuuccug

SEQ ID NO: 420240 - RNA, 32 nt, Homo Sapiens
aaauauuaaauugggaaaacuccaucaauaaa

SEQ ID NO: 420241 - RNA, 32 nt, Homo Sapiens
uguguuguccaaaaugccuguuuaguuuuuaa

SEQ ID NO: 420242 - RNA, 32 nt, Homo Sapiens
gcucuggcuggcaggacaggacaggcuggccc

SEQ ID NO: 420243 - RNA, 32 nt, Homo Sapiens
cugcagagggucaaguccaagcuagagaaaga

SEQ ID NO: 420244 - RNA, 32 nt, Homo Sapiens
uuauaugaacagagaauauacucuguucauau

SEQ ID NO: 420245 - RNA, 29 nt, Homo Sapiens
cauugcaucaggaugucuaugaaauggac

SEQ ID NO: 420246 - RNA, 32 nt, Homo Sapiens
uuuggaguauauaacauuuacauuaaggacuc

SEQ ID NO: 420247 - RNA, 32 nt, Homo Sapiens
ucuaaucccuuagcaucagcuccucccucagu

SEQ ID NO: 420248 - RNA, 32 nt, Homo Sapiens
uuaagugugcccuuaaaugauuuuuguguucu

SEQ ID NO: 420249 - RNA, 32 nt, Homo Sapiens
aaggcauacuaaaaaauguugagugguuaucu

SEQ ID NO: 420250 - RNA, 32 nt, Homo Sapiens
aacaguuuuugauagcacaucuacaugcaucu

SEQ ID NO: 420251 - RNA, 32 nt, Homo Sapiens
caucugcacaaugaaaucauggcuaagaaugc

SEQ ID NO: 420252 - RNA, 32 nt, Homo Sapiens
cugcuuacucacuccuucucccucuuucugga

SEQ ID NO: 420253 - RNA, 32 nt, Homo Sapiens
ggugacuggugccucugcacugacggaggacu

SEQ ID NO: 420254 - RNA, 32 nt, Homo Sapiens
uaacuuuaaguacaccaugcagcaauguaaua

SEQ ID NO: 420255 - RNA, 32 nt, Homo Sapiens
uaucucuggcacacgucuuaguccacuagagc

SEQ ID NO: 420256 - RNA, 32 nt, Homo Sapiens
uuuguuguauaaagaugggaucgguguaguua

SEQ ID NO: 420257 - RNA, 32 nt, Homo Sapiens
ucugugcugagccccaggcucccggccccuua

SEQ ID NO: 420258 - RNA, 32 nt, Homo Sapiens
gggcccccuguccccaggacccuggccagcca

SEQ ID NO: 420259 - RNA, 32 nt, Homo Sapiens
ugaucuuuugcucuuccaaccagcauuuauua

SEQ ID NO: 420260 - RNA, 32 nt, Homo Sapiens
cucuccaggcccagcucuuccucccggcggcc

SEQ ID NO: 420261 - RNA, 32 nt, Homo Sapiens
ugccuguaaccucagcuacuugggaggcugag

SEQ ID NO: 420262 - RNA, 32 nt, Homo Sapiens
gcuccagccaucuuuguggaaagggggcugcu

SEQ ID NO: 420263 - RNA, 32 nt, Homo Sapiens
cgcugccacggcugcuggcccgggcccgggcu

SEQ ID NO: 420264 - RNA, 32 nt, Homo Sapiens
ccugucgucaggccuugguuuccuugucuguc

SEQ ID NO: 420265 - RNA, 32 nt, Homo Sapiens
uucagauagagguauuaagauguguggcauuu

SEQ ID NO: 420266 - RNA, 32 nt, Homo Sapiens
gacugaugaugauauccauuuuguagacucau

SEQ ID NO: 420267 - RNA, 32 nt, Homo Sapiens
aggaggaggagcugggcagggccugcaccagg

SEQ ID NO: 420268 - RNA, 32 nt, Homo Sapiens
cauuaaaugaauauuuugauaauaauauuguu

SEQ ID NO: 420269 - RNA, 32 nt, Homo Sapiens
cuucggggaaaggaccuuguaucuuggaguga

SEQ ID NO: 420270 - RNA, 32 nt, Homo Sapiens
acgauaucugccccaaaccucuguaaccccaa

SEQ ID NO: 420271 - RNA, 32 nt, Homo Sapiens
uguucggauuuccaauaaagaaacagagugau

SEQ ID NO: 420272 - RNA, 32 nt, Homo Sapiens
cgggucgcgggugggaggagaggcacgccggg

SEQ ID NO: 420273 - RNA, 32 nt, Homo Sapiens
ggggucuucuuaggaguuaggcaaguacaggc

SEQ ID NO: 420274 - RNA, 32 nt, Homo Sapiens
cuggaaaguuccuccccuccagcccucaacca

SEQ ID NO: 420275 - RNA, 32 nt, Homo Sapiens
ugcuucaucaccuauauuaggcaaauuccauu

SEQ ID NO: 420276 - RNA, 32 nt, Homo Sapiens
auacugcaggcacaauuuaaugcaaacccaau

SEQ ID NO: 420277 - RNA, 32 nt, Homo Sapiens
ggcggcgcuccagccucggggcaggugcgcgg

SEQ ID NO: 420278 - RNA, 32 nt, Homo Sapiens
cagugugaguggcuuuccccuguccaguccuu

SEQ ID NO: 420279 - RNA, 32 nt, Homo Sapiens
cuaccuccaagccccgcaucccucugugguug

SEQ ID NO: 420280 - RNA, 32 nt, Homo Sapiens
cacuccaaacuguguauagucaaccucaucau

SEQ ID NO: 420281 - RNA, 32 nt, Homo Sapiens
ucucggggcuccuggguugcuucuggaagggc

SEQ ID NO: 420282 - RNA, 32 nt, Homo Sapiens
aacagcagacucagcucugacauucugauucg

SEQ ID NO: 420283 - RNA, 32 nt, Homo Sapiens
agggggugaccagcacagcuccagccagcagc

SEQ ID NO: 420284 - RNA, 32 nt, Homo Sapiens
agaggaaacaaaugugaaguuguggacucuac

SEQ ID NO: 420285 - RNA, 32 nt, Homo Sapiens
ccagacuccuauuagccccuccuuccaggagc

SEQ ID NO: 420286 - RNA, 32 nt, Homo Sapiens
gaaaggauaugcucagacucuugcuuguucag

SEQ ID NO: 420287 - RNA, 32 nt, Homo Sapiens
ugggacuuagcgucuuucuacccggcagggaa

SEQ ID NO: 420288 - RNA, 32 nt, Homo Sapiens
ccggggcagggugggcagggcuuuuguggguu

SEQ ID NO: 420289 - RNA, 32 nt, Homo Sapiens
ggaagaagaugaugauugaguaugaaauauga

SEQ ID NO: 420290 - RNA, 32 nt, Homo Sapiens
aaaguaaaguaauauacuguauggaaaguuac

SEQ ID NO: 420291 - RNA, 32 nt, Homo Sapiens
gauugaagaugaaaggaguaagaaauuaaggc

SEQ ID NO: 420292 - RNA, 32 nt, Homo Sapiens
aaggacuuggggaaaguccuuccacugcucuu

SEQ ID NO: 420293 - RNA, 32 nt, Homo Sapiens
uaaauuauauugcuaugucucuguuucugaac

SEQ ID NO: 420294 - RNA, 32 nt, Homo Sapiens
cucggaaacgcggcgcggccggcugccggaaa

SEQ ID NO: 420295 - RNA, 32 nt, Homo Sapiens
aauagaggaauaaaugucuucaguugucucuc

SEQ ID NO: 420296 - RNA, 32 nt, Homo Sapiens
cuggcaggggccgguggcucagcgggccucgc

SEQ ID NO: 420297 - RNA, 32 nt, Homo Sapiens
ucuguuccugcaguaguaacucuucuuucucu

SEQ ID NO: 420298 - RNA, 32 nt, Homo Sapiens
ucguccuuuaccauaucucauugggucaaagc

SEQ ID NO: 420299 - RNA, 32 nt, Homo Sapiens
cuccaugccuucuugggaggguggccgccaac

SEQ ID NO: 420300 - RNA, 32 nt, Homo Sapiens
ucagauaguaacucuguguuuaacuuuuugag

SEQ ID NO: 420301 - RNA, 32 nt, Homo Sapiens
ucaacaguucccuccccuccacuaccccauuu

SEQ ID NO: 420302 - RNA, 32 nt, Homo Sapiens
aaacuggagcagccuguuaccugaccgaagau

SEQ ID NO: 420303 - RNA, 32 nt, Homo Sapiens
ucaggaggggucauugaugcagucauucucag

SEQ ID NO: 420304 - RNA, 32 nt, Homo Sapiens
ggagagguaccggcuucuccccgggcccucag

SEQ ID NO: 420305 - RNA, 32 nt, Homo Sapiens
uuaggaaaggagugcccgucggcgucuugguc

SEQ ID NO: 420306 - RNA, 32 nt, Homo Sapiens
ccucggcccucccagcucuuacacucagcucc

SEQ ID NO: 420307 - RNA, 32 nt, Homo Sapiens
cuagcuuagucuacacagauuuuuauaucaau

SEQ ID NO: 420308 - RNA, 32 nt, Homo Sapiens
gaugauugucauaagguuuuuagcauguuccu

SEQ ID NO: 420309 - RNA, 32 nt, Homo Sapiens
ucggaguuugucuccccgaacccaggcguccc

SEQ ID NO: 420310 - RNA, 32 nt, Homo Sapiens
ugaguggguaucgaguauuccaagcaacugga

SEQ ID NO: 420311 - RNA, 32 nt, Homo Sapiens
ucauccugacugccagcagucuggccagacac

SEQ ID NO: 420312 - RNA, 32 nt, Homo Sapiens
guuucuuccuuccuuaccuacucaagggcuuu

SEQ ID NO: 420313 - RNA, 32 nt, Homo Sapiens
accaucuuggcuaacacagugaaaccccgucu

SEQ ID NO: 420314 - RNA, 32 nt, Homo Sapiens
ccgccgccagccugaccucacacccucugggc

SEQ ID NO: 420315 - RNA, 32 nt, Homo Sapiens
uugaaagcucguguaauuuacuuuaagauuau

SEQ ID NO: 420316 - RNA, 32 nt, Homo Sapiens
gcucuccgaugcggcgagcgagcuggggaggg

SEQ ID NO: 420317 - RNA, 32 nt, Homo Sapiens
gucuguuccuaguugcaacaguucuuggaaac

SEQ ID NO: 420318 - RNA, 32 nt, Homo Sapiens
cuccagguccccuccgcccuagucccugccug

SEQ ID NO: 420319 - RNA, 32 nt, Homo Sapiens
acuaaucuguuugugagggaauauccauuccc

SEQ ID NO: 420320 - RNA, 32 nt, Homo Sapiens
ucauguucacugguagaaguagaguggagcau

SEQ ID NO: 420321 - RNA, 32 nt, Homo Sapiens
cugggucuugggaccuuguccuccccaguugg

SEQ ID NO: 420322 - RNA, 32 nt, Homo Sapiens
auuuauuaugcccaaaucaaccucugaaaaaa

SEQ ID NO: 420323 - RNA, 32 nt, Homo Sapiens
auccucucaagccccaggacccuucaaagggc

SEQ ID NO: 420324 - RNA, 32 nt, Homo Sapiens
acauuuaaaaauauggaaaaacaacccagacg

SEQ ID NO: 420325 - RNA, 32 nt, Homo Sapiens
ccuguugcuauuuuugaugauagagaauaaau

SEQ ID NO: 420326 - RNA, 32 nt, Homo Sapiens
aaaucgaaugaaauuaacuggguaaugaaaca

SEQ ID NO: 420327 - RNA, 32 nt, Homo Sapiens
ggggcagcaaaccaccauggcacauguguacc

SEQ ID NO: 420328 - RNA, 32 nt, Homo Sapiens
uauugcacucacucauuauauguauauuuagc

SEQ ID NO: 420329 - RNA, 31 nt, Homo Sapiens
cuguacagacagaaaaaacugagauguagcc

SEQ ID NO: 420330 - RNA, 32 nt, Homo Sapiens
agcugggcggucggcccggucccaccgaacug

SEQ ID NO: 420331 - RNA, 32 nt, Homo Sapiens
ucuugccagguccgcccuuggggaagcgugcc

SEQ ID NO: 420332 - RNA, 32 nt, Homo Sapiens
ucuaauaugccaccaauuauaagauuuauucc

SEQ ID NO: 420333 - RNA, 32 nt, Homo Sapiens
ccccagccccacagccggggccuccccagcau

SEQ ID NO: 420334 - RNA, 32 nt, Homo Sapiens
aaguugccacagcccucacucagggcuucaug

SEQ ID NO: 420335 - RNA, 32 nt, Homo Sapiens
agaguuugaggguggguucggggcugcgcagc

SEQ ID NO: 420336 - RNA, 32 nt, Homo Sapiens
cccagccccugcgcgcagcccgggccgaguag

SEQ ID NO: 420337 - RNA, 32 nt, Homo Sapiens
uuuguagcagcauaauuauuuccaaagacccc

SEQ ID NO: 420338 - RNA, 31 nt, Homo Sapiens
uuaucuggguacuccugguagauuagcuguu

SEQ ID NO: 420339 - RNA, 32 nt, Homo Sapiens
acaguggggaaguuccucaaaaaacuaaaacu

SEQ ID NO: 420340 - RNA, 32 nt, Homo Sapiens
uggugggcuuuaguuuagucccagaaauggag

SEQ ID NO: 420341 - RNA, 30 nt, Homo Sapiens
gcagcgccgcggcgcgcgcgauccggcuga

SEQ ID NO: 420342 - RNA, 32 nt, Homo Sapiens
cccuccucuccagcccucccagcccucccgca

SEQ ID NO: 420343 - RNA, 32 nt, Homo Sapiens
acugaugcugaggaugauugaggugggucuac

SEQ ID NO: 420344 - RNA, 32 nt, Homo Sapiens
uaacauggaguggauuuacauguauucucuau

SEQ ID NO: 420345 - RNA, 32 nt, Homo Sapiens
gcggcugcaagagguaaugagagauggcaaga

SEQ ID NO: 420346 - RNA, 32 nt, Homo Sapiens
gaaccauuuucuuuccucuucuauuaagugua

SEQ ID NO: 420347 - RNA, 32 nt, Homo Sapiens
ucacguuugcccgugacuguccuggcuaugcg

SEQ ID NO: 420348 - RNA, 30 nt, Homo Sapiens
gauggggugguaaugggggugggggacacg

SEQ ID NO: 420349 - RNA, 32 nt, Homo Sapiens
ucacuugugucacguuuccugaaacagcacgu

SEQ ID NO: 420350 - RNA, 32 nt, Homo Sapiens
caagacaaaaacagagucuugagaaucucaac

SEQ ID NO: 420351 - RNA, 32 nt, Homo Sapiens
cugaaguugcuuagaguacuucuuugaccaag

SEQ ID NO: 420352 - RNA, 32 nt, Homo Sapiens
gcccagccugugcccucgcaggucuuggugcc

SEQ ID NO: 420353 - RNA, 32 nt, Homo Sapiens
auaaagaugaaauaaacuuauuacuuuaaagg

SEQ ID NO: 420354 - RNA, 32 nt, Homo Sapiens
uucaucacagaaaagaugaaaagagaaaagag

SEQ ID NO: 420355 - RNA, 32 nt, Homo Sapiens
cccgcucuccccacccuguucugagccaaaac

SEQ ID NO: 420356 - RNA, 32 nt, Homo Sapiens
cugauuuggcuccucagccccagcaccaccag

SEQ ID NO: 420357 - RNA, 32 nt, Homo Sapiens
caggagacucugcgggagcuggagaggcugcg

SEQ ID NO: 420358 - RNA, 32 nt, Homo Sapiens
uauaaagaugaggacagaagcaucucuacaga

SEQ ID NO: 420359 - RNA, 32 nt, Homo Sapiens
ggcgcgcguucgcugccuccucagcuccagga

SEQ ID NO: 420360 - RNA, 32 nt, Homo Sapiens
uuuuaaaaggauugauucagcuaagcaaaguu

SEQ ID NO: 420361 - RNA, 32 nt, Homo Sapiens
caacgccgcucccagccggcccugguugcguc

SEQ ID NO: 420362 - RNA, 32 nt, Homo Sapiens
cucauauccugcuuuagccuagcugcugcuua

SEQ ID NO: 420363 - RNA, 32 nt, Homo Sapiens
ucaccccaccccacccaaacugaguggcaaac

SEQ ID NO: 420364 - RNA, 32 nt, Homo Sapiens
ugugcauugcuuuauuuaguugaaauaaaauc

SEQ ID NO: 420365 - RNA, 32 nt, Homo Sapiens
gaauaagacgucagcauucuucagcauugucg

SEQ ID NO: 420366 - RNA, 32 nt, Homo Sapiens
uggcugcagcccagcccaccuucccagcguuc

SEQ ID NO: 420367 - RNA, 32 nt, Homo Sapiens
aggcagcccucccagugcccaagggccaccaa

SEQ ID NO: 420368 - RNA, 32 nt, Homo Sapiens
cuucacaucccauugggacuccaugcuccuug

SEQ ID NO: 420369 - RNA, 32 nt, Homo Sapiens
gacugccgugacuccuaguccaaugucuguuu

SEQ ID NO: 420370 - RNA, 32 nt, Homo Sapiens
uccucgcuccacguuucaggcaggcaccuagc

SEQ ID NO: 420371 - RNA, 32 nt, Homo Sapiens
cucgcugccgugcguuuaacccaggcgaggag

SEQ ID NO: 420372 - RNA, 32 nt, Homo Sapiens
gguauagauugugccgucauagcuuuacaggu

SEQ ID NO: 420373 - RNA, 32 nt, Homo Sapiens
gaaaaacaaauaaaacaaaaccaacucagacc

SEQ ID NO: 420374 - RNA, 32 nt, Homo Sapiens
uugccucugaagauuucacuccaucaagaucu

SEQ ID NO: 420375 - RNA, 32 nt, Homo Sapiens
ccgagcuggguugccccacugugcuuguaucu

SEQ ID NO: 420376 - RNA, 32 nt, Homo Sapiens
caacauuguauuucuacauuuauuucaagacu

SEQ ID NO: 420377 - RNA, 32 nt, Homo Sapiens
gggguuucaucucuauggcugucagagguggg

SEQ ID NO: 420378 - RNA, 32 nt, Homo Sapiens
uuuuacuguuuuguguucaugaaucuuuauuu

SEQ ID NO: 420379 - RNA, 32 nt, Homo Sapiens
agaucacuaugaagagguucucugguuguuag

SEQ ID NO: 420380 - RNA, 31 nt, Homo Sapiens
ccguggcugccgguccucgaguugggggcug

SEQ ID NO: 420381 - RNA, 32 nt, Homo Sapiens
cagggcuccccggccacggcagcacagaacgg

SEQ ID NO: 420382 - RNA, 32 nt, Homo Sapiens
gaauuccuaccuuguuauucuaaacagauguc

SEQ ID NO: 420383 - RNA, 28 nt, Homo Sapiens
auuugaauuaauuaacauuugaguuugu

SEQ ID NO: 420384 - RNA, 32 nt, Homo Sapiens
gcccccuagguccccaaggaggcugcuaagaa

SEQ ID NO: 420385 - RNA, 32 nt, Homo Sapiens
uaacuugcuuuggcuuuauugcagugacuuuc

SEQ ID NO: 420386 - RNA, 32 nt, Homo Sapiens
aaacuacagcccaaguaugagagcagcguauc

SEQ ID NO: 420387 - RNA, 32 nt, Homo Sapiens
ugauccuggcauguccuuuauaagguauacuu

SEQ ID NO: 420388 - RNA, 32 nt, Homo Sapiens
cuguaccacgucugcuggucuccagccuugua

SEQ ID NO: 420389 - RNA, 32 nt, Homo Sapiens
uugccccucccucucccaacucucuacccggg

SEQ ID NO: 420390 - RNA, 32 nt, Homo Sapiens
auguugaacagcuagugaguggucaaucugag

SEQ ID NO: 420391 - RNA, 32 nt, Homo Sapiens
cuaggucggucccagguuagaagccuguucug

SEQ ID NO: 420392 - RNA, 32 nt, Homo Sapiens
acuuuuaugagcauauucuccuuauuggugga

SEQ ID NO: 420393 - RNA, 32 nt, Homo Sapiens
uugaaagcugugugacugccugagagaaccug

SEQ ID NO: 420394 - RNA, 32 nt, Homo Sapiens
cacagcccugguuuccugucacucagagcuga

SEQ ID NO: 420395 - RNA, 32 nt, Homo Sapiens
uuaucuugaaggaaccauuagauauggaaaau

SEQ ID NO: 420396 - RNA, 32 nt, Homo Sapiens
gucaaacuggagguccuguugucgcagagcau

SEQ ID NO: 420397 - RNA, 32 nt, Homo Sapiens
uauauuuaugcaucuauauacauauacuagau

SEQ ID NO: 420398 - RNA, 32 nt, Homo Sapiens
aaucccagaaggcaaacugugcauguucuacc

SEQ ID NO: 420399 - RNA, 32 nt, Homo Sapiens
auauucauuauuuucaaauggcuuuuggacua

SEQ ID NO: 420400 - RNA, 30 nt, Homo Sapiens
uagguguggggcgggcguccgcguccggca

SEQ ID NO: 420401 - RNA, 32 nt, Homo Sapiens
acagaagccacuugcuuggagcagacuaccau

SEQ ID NO: 420402 - RNA, 32 nt, Homo Sapiens
auuuauauguguucuuguucugauguuguuuc

SEQ ID NO: 420403 - RNA, 32 nt, Homo Sapiens
ggugguacccuuaagaggcauuugugucauga

SEQ ID NO: 420404 - RNA, 32 nt, Homo Sapiens
uuguuaauugguuuggagccuccuauguguga

SEQ ID NO: 420405 - RNA, 32 nt, Homo Sapiens
ccagggaaaaucaacaguaagugaggaugagc

SEQ ID NO: 420406 - RNA, 32 nt, Homo Sapiens
cuucggcacgugugucauuccccgggauuucu

SEQ ID NO: 420407 - RNA, 32 nt, Homo Sapiens
uugcuguuauuuacaaacgacagugcauucag

SEQ ID NO: 420408 - RNA, 32 nt, Homo Sapiens
aaaacuuugcuuucuucaguuaucacauguga

SEQ ID NO: 420409 - RNA, 32 nt, Homo Sapiens
cucaccugugauuagccugcuaaugugccccc

SEQ ID NO: 420410 - RNA, 32 nt, Homo Sapiens
guuaagaaugggaauuuguccuguguucuggg

SEQ ID NO: 420411 - RNA, 32 nt, Homo Sapiens
gcugaaauggugcccaguccaucagcagugau

SEQ ID NO: 420412 - RNA, 32 nt, Homo Sapiens
ccaccaaaacccaugcacagugcugcagaaac

SEQ ID NO: 420413 - RNA, 32 nt, Homo Sapiens
aauucucuccuggagcacgaaaaggaagggga

SEQ ID NO: 420414 - RNA, 32 nt, Homo Sapiens
auucuggccaaugaaauaucucccuggcaggg

SEQ ID NO: 420415 - RNA, 29 nt, Homo Sapiens
ggcauguagaauauguaccauagguauca

SEQ ID NO: 420416 - RNA, 32 nt, Homo Sapiens
gcaagauaagauguauuuguauuuucuagugu

SEQ ID NO: 420417 - RNA, 32 nt, Homo Sapiens
gcucggaggguggaagccggggucucgcgggc

SEQ ID NO: 420418 - RNA, 32 nt, Homo Sapiens
gguagaggcagacaaaggcagaaaaaauaaag

SEQ ID NO: 420419 - RNA, 32 nt, Homo Sapiens
caacaccuuuugcucuacaucacgcugcgagu

SEQ ID NO: 420420 - RNA, 32 nt, Homo Sapiens
aguuguccuauguaucaucauuuacucuggga

SEQ ID NO: 420421 - RNA, 32 nt, Homo Sapiens
ucucacuaaguggcccaaguauuuuuguuuac

SEQ ID NO: 420422 - RNA, 32 nt, Homo Sapiens
cagucaaccuauuuggauacuuggcaaaagau

SEQ ID NO: 420423 - RNA, 32 nt, Homo Sapiens
ucccagaaaacaaaacaaaauaaugcuuuucg

SEQ ID NO: 420424 - RNA, 32 nt, Homo Sapiens
ccuagcucgccagcgcugugcuccucauggac

SEQ ID NO: 420425 - RNA, 32 nt, Homo Sapiens
gaccuaggacaaguaccucacuucucugagcc

SEQ ID NO: 420426 - RNA, 32 nt, Homo Sapiens
uucgccaaaaauuuauucaaauaauuacuccu

SEQ ID NO: 420427 - RNA, 32 nt, Homo Sapiens
aaagcgggaaggagaaggcaaccuggugccca

SEQ ID NO: 420428 - RNA, 32 nt, Homo Sapiens
ccagcccagccccgcccuccccagacuccgcg

SEQ ID NO: 420429 - RNA, 32 nt, Homo Sapiens
aaaauguauauucucccuuuuauauugcaucu

SEQ ID NO: 420430 - RNA, 32 nt, Homo Sapiens
aaguaauaaacacuuaaauugaugccuggaau

SEQ ID NO: 420431 - RNA, 32 nt, Homo Sapiens
uguggcugccagccaggcugcccggcaagcgg

SEQ ID NO: 420432 - RNA, 32 nt, Homo Sapiens
uuuccugguccucuccuuacuucugugggccu

SEQ ID NO: 420433 - RNA, 30 nt, Homo Sapiens
uagagaggcaggcaagcaguuggguucgcc

SEQ ID NO: 420434 - RNA, 30 nt, Homo Sapiens
uagggugggggcgauagggucagcggguau

SEQ ID NO: 420435 - RNA, 32 nt, Homo Sapiens
uugggcaugauuacugcaguguuuguucuuua

SEQ ID NO: 420436 - RNA, 32 nt, Homo Sapiens
ccguauguccugaaaacaugagggacuggcag

SEQ ID NO: 420437 - RNA, 32 nt, Homo Sapiens
ccaggcucagaggucccggcgccucucgcuga

SEQ ID NO: 420438 - RNA, 32 nt, Homo Sapiens
caggcccggcccagcccgccugggcugccgcu

SEQ ID NO: 420439 - RNA, 32 nt, Homo Sapiens
ccuugugcccuacaggagggaccuccugggac

SEQ ID NO: 420440 - RNA, 32 nt, Homo Sapiens
aagcccacccucaggcauuacagcuagacucc

SEQ ID NO: 420441 - RNA, 32 nt, Homo Sapiens
augugugcuugugaugauacacacacaugcac

SEQ ID NO: 420442 - RNA, 32 nt, Homo Sapiens
uuccacccaucccaagguuuucuccgccucac

SEQ ID NO: 420443 - RNA, 32 nt, Homo Sapiens
gucgacaucccaccuccuuucgaccuggccug

SEQ ID NO: 420444 - RNA, 32 nt, Homo Sapiens
cgugcagggcccgcgccgccgccgguaucucc

SEQ ID NO: 420445 - RNA, 32 nt, Homo Sapiens
uuucacuugggucaaucaaaucuguaacacug

SEQ ID NO: 420446 - RNA, 29 nt, Homo Sapiens
cccucgaugacuuuccuccggggcgcgcg

SEQ ID NO: 420447 - RNA, 32 nt, Homo Sapiens
gagcgcgugugagcgccgaggggggcgcagga

SEQ ID NO: 420448 - RNA, 32 nt, Homo Sapiens
gaggggcugugacccucuucccccaggcccuc

SEQ ID NO: 420449 - RNA, 32 nt, Homo Sapiens
caggacucgcugcugcugcugcugcuugugua

SEQ ID NO: 420450 - RNA, 32 nt, Homo Sapiens
aagccguggcccccuucuccagugcuuucggg

SEQ ID NO: 420451 - RNA, 32 nt, Homo Sapiens
ucccacacaaaacacgcacacagagccaggug

SEQ ID NO: 420452 - RNA, 32 nt, Homo Sapiens
gccuuggccaagacuggcauggagccagcacu

SEQ ID NO: 420453 - RNA, 32 nt, Homo Sapiens
aaucuagaugcaacagcgaaacaaagaaccca

SEQ ID NO: 420454 - RNA, 32 nt, Homo Sapiens
ggcuccugcugacuucggaggggcggaugcag

SEQ ID NO: 420455 - RNA, 32 nt, Homo Sapiens
guccuggcagugccucugcugugcugcacauu

SEQ ID NO: 420456 - RNA, 32 nt, Homo Sapiens
uauuuauuuuucccagugaaaaguguauuuug

SEQ ID NO: 420457 - RNA, 32 nt, Homo Sapiens
aaucguuuaaucuaaagcaguuuccccuguuu

SEQ ID NO: 420458 - RNA, 32 nt, Homo Sapiens
acccucaggguggacugaaaugggggauggaa

SEQ ID NO: 420459 - RNA, 32 nt, Homo Sapiens
aaaaaaauggguuuuucuuuucuacugcauca

SEQ ID NO: 420460 - RNA, 32 nt, Homo Sapiens
agccauguggguacuguaaacacacguuuauc

SEQ ID NO: 420461 - RNA, 32 nt, Homo Sapiens
uggcgccgccccacccgcauuaucacugugug

SEQ ID NO: 420462 - RNA, 32 nt, Homo Sapiens
cuauuuuuguaaaaauggaaugcugaaauaag

SEQ ID NO: 420463 - RNA, 32 nt, Homo Sapiens
aauuuugcugacaaaagugaaguaacaaauau

SEQ ID NO: 420464 - RNA, 32 nt, Homo Sapiens
auuuuugcccacccucuuuccaaauaagaagg

SEQ ID NO: 420465 - RNA, 32 nt, Homo Sapiens
cucugcgcgggcccucggaggaggcggcggcg

SEQ ID NO: 420466 - RNA, 32 nt, Homo Sapiens
caauggcuccagugcccucccucuguucccug

SEQ ID NO: 420467 - RNA, 32 nt, Homo Sapiens
auuaaggaugacugaacacauaacuguugaau

SEQ ID NO: 420468 - RNA, 32 nt, Homo Sapiens
aaguuaugaaagaugguggcuuucauuuaggu

SEQ ID NO: 420469 - RNA, 32 nt, Homo Sapiens
guaagaagacccacaaggaguggaccaagacu

SEQ ID NO: 420470 - RNA, 32 nt, Homo Sapiens
accucucacgggcacccuagcugcugacagcc

SEQ ID NO: 420471 - RNA, 32 nt, Homo Sapiens
gacucgcucucccuccucccuguguuuggccu

SEQ ID NO: 420472 - RNA, 32 nt, Homo Sapiens
cagacccagggcggccccucuggcggcucugc

SEQ ID NO: 420473 - RNA, 32 nt, Homo Sapiens
guuuucuuauuuucuuuuuaauuaaaaaacaa

SEQ ID NO: 420474 - RNA, 32 nt, Homo Sapiens
gugaggcuaucccugcagcugcagggcacuaa

SEQ ID NO: 420475 - RNA, 32 nt, Homo Sapiens
gcagcgccgggcgaccccgcccgggccucgga

SEQ ID NO: 420476 - RNA, 32 nt, Homo Sapiens
cagaggguucuggaagaugaaaugaguguaaa

SEQ ID NO: 420477 - RNA, 32 nt, Homo Sapiens
cacagauuuuuaguguuaauauuguguaaaug

SEQ ID NO: 420478 - RNA, 32 nt, Homo Sapiens
auucgcaucuucucuauccacaucaugaccaa

SEQ ID NO: 420479 - RNA, 32 nt, Homo Sapiens
cagcccugggggugggggguggugggcaggga

SEQ ID NO: 420480 - RNA, 32 nt, Homo Sapiens
gccgaggcgggugaaucaugaggucaggagau

SEQ ID NO: 420481 - RNA, 32 nt, Homo Sapiens
aagggaaggcggagggcggcggggacaagaug

SEQ ID NO: 420482 - RNA, 32 nt, Homo Sapiens
aggcagcaccucaggcccuuuguggggcaggg

SEQ ID NO: 420483 - RNA, 32 nt, Homo Sapiens
uuauaacacuguauacaguuauuucuaaagca

SEQ ID NO: 420484 - RNA, 32 nt, Homo Sapiens
guggcagauaaggcccugguuucuccucagcg

SEQ ID NO: 420485 - RNA, 32 nt, Homo Sapiens
ugcaccaugcccgauuuuuuuauuuuauuuuc

SEQ ID NO: 420486 - RNA, 32 nt, Homo Sapiens
uuccaaagggaagagugcagggggacggggcc

SEQ ID NO: 420487 - RNA, 32 nt, Homo Sapiens
uuagaguucccucucaggucuuucuggcucuc

SEQ ID NO: 420488 - RNA, 32 nt, Homo Sapiens
cugcugaacaccugagugcccgggcaggcuuc

SEQ ID NO: 420489 - RNA, 32 nt, Homo Sapiens
uuacauuaugacaggaaguaaaaguuuacaug

SEQ ID NO: 420490 - RNA, 32 nt, Homo Sapiens
aggcuggaauagaacaaaagcccaccacaagu

SEQ ID NO: 420491 - RNA, 32 nt, Homo Sapiens
guagcgagacaaaaacaugccauugugaagaa

SEQ ID NO: 420492 - RNA, 32 nt, Homo Sapiens
acucuucucgcuccgcuuucgccccgcaucuu

SEQ ID NO: 420493 - RNA, 32 nt, Homo Sapiens
cggggacuccgugucccggcauccaccgcggc

SEQ ID NO: 420494 - RNA, 32 nt, Homo Sapiens
aauaagaaaaauacuggccagcugcaguggcu

SEQ ID NO: 420495 - RNA, 32 nt, Homo Sapiens
uagcgguuuaccauugguuacuugguguaugc

SEQ ID NO: 420496 - RNA, 32 nt, Homo Sapiens
cccccucccguggacuucugugccgccccguc

SEQ ID NO: 420497 - RNA, 32 nt, Homo Sapiens
auaagcaaagggggaagaauugaaagagagag

SEQ ID NO: 420498 - RNA, 32 nt, Homo Sapiens
acaucaagcuguucucucucucucuuuuuuuu

SEQ ID NO: 420499 - RNA, 32 nt, Homo Sapiens
uuccaacaaaaauggcuuuauucauaagaaag

SEQ ID NO: 420500 - RNA, 32 nt, Homo Sapiens
cggagcagcuggggccggggcgcggaugcugg

SEQ ID NO: 420501 - RNA, 32 nt, Homo Sapiens
ucaauaccagccuggccaacguggugaaaccc

SEQ ID NO: 420502 - RNA, 32 nt, Homo Sapiens
cuccucacccucagcacaacgaugugaucgaa

SEQ ID NO: 420503 - RNA, 32 nt, Homo Sapiens
cgccuguaauccuagcacuuuguaaggcugag

SEQ ID NO: 420504 - RNA, 32 nt, Homo Sapiens
gcauggggaaaggggcuuccugcaccacacau

SEQ ID NO: 420505 - RNA, 32 nt, Homo Sapiens
uuuugagggauuuuaaaguuuccaggaaaaaa

SEQ ID NO: 420506 - RNA, 31 nt, Homo Sapiens
aaauccacccucucagcucagcccagcccug

SEQ ID NO: 420507 - RNA, 32 nt, Homo Sapiens
uucuuacugaaucaaaucaugauucuagaacu

SEQ ID NO: 420508 - RNA, 32 nt, Homo Sapiens
ggguccugaagccccagaacuggcauguggaa

SEQ ID NO: 420509 - RNA, 32 nt, Homo Sapiens
gagucgaugauaaccuaauuucauugagagaa

SEQ ID NO: 420510 - RNA, 32 nt, Homo Sapiens
uauuuucucucguuuccuuguuuauuuuuguc

SEQ ID NO: 420511 - RNA, 32 nt, Homo Sapiens
agaccccgggcucgcagucgccccaugaauuu

SEQ ID NO: 420512 - RNA, 32 nt, Homo Sapiens
uaggacaacaaauuuuuaaaagaauauucaua

SEQ ID NO: 420513 - RNA, 32 nt, Homo Sapiens
accugugggugggggagggagaccacacaugu

SEQ ID NO: 420514 - RNA, 32 nt, Homo Sapiens
uguacuuuaaacaauugcuuugcugagauguu

SEQ ID NO: 420515 - RNA, 32 nt, Homo Sapiens
gcgcugcgcucuuguccccgcaggucgcagcc

SEQ ID NO: 420516 - RNA, 32 nt, Homo Sapiens
gcacuccggcccggcucccgccucggccccga

SEQ ID NO: 420517 - RNA, 32 nt, Homo Sapiens
agggacacuccagccccccucucuggcccacc

SEQ ID NO: 420518 - RNA, 32 nt, Homo Sapiens
ggccgugacaaugucgcggggcugguagcagg

SEQ ID NO: 420519 - RNA, 32 nt, Homo Sapiens
uggaccuuucaaaaccacaacaaaaccucagu

SEQ ID NO: 420520 - RNA, 32 nt, Homo Sapiens
cuaagucacagcgaggugucugucccagggcu

SEQ ID NO: 420521 - RNA, 32 nt, Homo Sapiens
gacguggaucugcucucgcuuuagcugcucgc

SEQ ID NO: 420522 - RNA, 32 nt, Homo Sapiens
agccuuucguuuugucuccccuguuuuucugc

SEQ ID NO: 420523 - RNA, 32 nt, Homo Sapiens
caucgccccgcgcccacccccaucgccccugc

SEQ ID NO: 420524 - RNA, 32 nt, Homo Sapiens
aaaugcgcggcuccuuuaaccggagcgcucag

SEQ ID NO: 420525 - RNA, 32 nt, Homo Sapiens
aaagccuuuucaucuguaaugcagcuuguaau

SEQ ID NO: 420526 - RNA, 32 nt, Homo Sapiens
ccaaauaaaaaaccucuuccuucuuuaaucug

SEQ ID NO: 420527 - RNA, 32 nt, Homo Sapiens
cuuuugaagaacaaagacaaaaauaggaaguu

SEQ ID NO: 420528 - RNA, 32 nt, Homo Sapiens
aaguagauauuuguaaucuuuuaccacuuugg

SEQ ID NO: 420529 - RNA, 32 nt, Homo Sapiens
agauggcgggggcugcgccccggcgccgggca

SEQ ID NO: 420530 - RNA, 32 nt, Homo Sapiens
aggcugcagaccccacgcagugucucauacag

SEQ ID NO: 420531 - RNA, 31 nt, Homo Sapiens
aaauauuugugcuuuagguguaguuaccaga

SEQ ID NO: 420532 - RNA, 32 nt, Homo Sapiens
aguaaguucauuuuucuauugcuaauuuugcu

SEQ ID NO: 420533 - RNA, 32 nt, Homo Sapiens
uagguaccuccauguuucuuguuuccuuucau

SEQ ID NO: 420534 - RNA, 32 nt, Homo Sapiens
cgggagaagccacacccaacaugcccauuagc

SEQ ID NO: 420535 - RNA, 32 nt, Homo Sapiens
uucaagcagcucuggagagaaauggcggguua

SEQ ID NO: 420536 - RNA, 32 nt, Homo Sapiens
gcuuguuugaauuuucugauaucugauuuuca

SEQ ID NO: 420537 - RNA, 32 nt, Homo Sapiens
gcugugguuccuuucuaggagcauccaacagg

SEQ ID NO: 420538 - RNA, 32 nt, Homo Sapiens
ucaaggcucacugcagccuggaccuccugguu

SEQ ID NO: 420539 - RNA, 32 nt, Homo Sapiens
uccaggcagugagcguacuuuuuacacccugu

SEQ ID NO: 420540 - RNA, 32 nt, Homo Sapiens
gccaaggcggguggaucacgaggucaggaauu

SEQ ID NO: 420541 - RNA, 32 nt, Homo Sapiens
uuugucauuuuucaucaagcaacagaggacca

SEQ ID NO: 420542 - RNA, 32 nt, Homo Sapiens
ccgugauugcaaauuaugaccucaaauuccau

SEQ ID NO: 420543 - RNA, 32 nt, Homo Sapiens
cgcaccuccucgccgcugucgggcucguccug

SEQ ID NO: 420544 - RNA, 32 nt, Homo Sapiens
cuggcuaagaacucauggccacuguggaaauc

SEQ ID NO: 420545 - RNA, 32 nt, Homo Sapiens
gccgggccgcggaggaggcaggcggcccccac

SEQ ID NO: 420546 - RNA, 32 nt, Homo Sapiens
ucagaguaacgagaagacaaacuccggcacug

SEQ ID NO: 420547 - RNA, 32 nt, Homo Sapiens
gacagagaacagaggaugccuguuuuugcccc

SEQ ID NO: 420548 - RNA, 32 nt, Homo Sapiens
aacuuguuaugaaaucuuuguugugugaugca

SEQ ID NO: 420549 - RNA, 29 nt, Homo Sapiens
gcauugggacgucugcacuugagcuucua

SEQ ID NO: 420550 - RNA, 32 nt, Homo Sapiens
accuggagcccacagagucuguguguagccag

SEQ ID NO: 420551 - RNA, 32 nt, Homo Sapiens
gagucgccuccgccugauccccggccugucgc

SEQ ID NO: 420552 - RNA, 32 nt, Homo Sapiens
agaagguaauuuccuccccaaauugaccuugg

SEQ ID NO: 420553 - RNA, 32 nt, Homo Sapiens
guagcacucccucuucgcucucuuccuccugc

SEQ ID NO: 420554 - RNA, 32 nt, Homo Sapiens
cuucucuauaaggagcuuuuugacuauggaag

SEQ ID NO: 420555 - RNA, 32 nt, Homo Sapiens
gaacuucuuuuauaaugguguaccucagcagc

SEQ ID NO: 420556 - RNA, 32 nt, Homo Sapiens
acuguagauaaaaccauauacuaaaucuauaa

SEQ ID NO: 420557 - RNA, 32 nt, Homo Sapiens
uaccugugccgggggccggaaccuggccccgg

SEQ ID NO: 420558 - RNA, 32 nt, Homo Sapiens
ggguguggguggcacaggaucuggggcauggg

SEQ ID NO: 420559 - RNA, 32 nt, Homo Sapiens
cucgcagccagacucaucuaaggguucuuguc

SEQ ID NO: 420560 - RNA, 32 nt, Homo Sapiens
uaauaaucgagaaugccugggcauuuuacaaa

SEQ ID NO: 420561 - RNA, 32 nt, Homo Sapiens
caugaauaaaaauaaacuuuuuuucuucaaaa

SEQ ID NO: 420562 - RNA, 32 nt, Homo Sapiens
gcccuccugugcuggugacccagcaucugagu

SEQ ID NO: 420563 - RNA, 32 nt, Homo Sapiens
gcccagcucucguauccccaagccacaccauc

SEQ ID NO: 420564 - RNA, 32 nt, Homo Sapiens
auuuuuaaaaauuucuaguagauuuuuggccu

SEQ ID NO: 420565 - RNA, 32 nt, Homo Sapiens
ggggagggucugugugaaggggccggcuucuc

SEQ ID NO: 420566 - RNA, 32 nt, Homo Sapiens
ccuggcuagguagggagggggugguuaucgcc

SEQ ID NO: 420567 - RNA, 32 nt, Homo Sapiens
ggacuaguccuagaugcaaacucaagagccca

SEQ ID NO: 420568 - RNA, 32 nt, Homo Sapiens
gaugaagugggucccggcacggugggcauucu

SEQ ID NO: 420569 - RNA, 32 nt, Homo Sapiens
cugguuccgcguucugguuccgccauggaauc

SEQ ID NO: 420570 - RNA, 32 nt, Homo Sapiens
uugcccuaagcagacagcugcagaugagaggg

SEQ ID NO: 420571 - RNA, 32 nt, Homo Sapiens
ucaaagggcagaggggaaacugucccuuggcc

SEQ ID NO: 420572 - RNA, 28 nt, Homo Sapiens
caggggggcugagccaggaugugcaaua

SEQ ID NO: 420573 - RNA, 32 nt, Homo Sapiens
aguugcuggugccuccuccuucacccagcguc

SEQ ID NO: 420574 - RNA, 32 nt, Homo Sapiens
cugcccgccuuggccucccaaagugcugggau

SEQ ID NO: 420575 - RNA, 32 nt, Homo Sapiens
ggccccagggucugcuccugcugaggaccagc

SEQ ID NO: 420576 - RNA, 32 nt, Homo Sapiens
cuuuugccuucucuccucucugacuuuugagg

SEQ ID NO: 420577 - RNA, 32 nt, Homo Sapiens
ugcacuaucuuaauguugaaaauauuuacaag

SEQ ID NO: 420578 - RNA, 30 nt, Homo Sapiens
cgcgcgcccgcgcagcaguuccaggaagga

SEQ ID NO: 420579 - RNA, 32 nt, Homo Sapiens
aggacaggcugcgaccccgggcuggggacgcc

SEQ ID NO: 420580 - RNA, 32 nt, Homo Sapiens
uggcucacaccuguaaucacagcacuuuggga

SEQ ID NO: 420581 - RNA, 32 nt, Homo Sapiens
uuuccugggugauggcagcagauucuuccauu

SEQ ID NO: 420582 - RNA, 32 nt, Homo Sapiens
caguuuguuucauuuuauuuauuucauuuuau

SEQ ID NO: 420583 - RNA, 32 nt, Homo Sapiens
aguuucuugaacauuuacccucuuccuuguug

SEQ ID NO: 420584 - RNA, 32 nt, Homo Sapiens
auuugauauuuaacccuuauuaaaucuuucuu

SEQ ID NO: 420585 - RNA, 32 nt, Homo Sapiens
gcuucuuucaagggcuuuccugugccagguga

SEQ ID NO: 420586 - RNA, 32 nt, Homo Sapiens
uucauuugccuauucccacaccuccacaguuc

SEQ ID NO: 420587 - RNA, 32 nt, Homo Sapiens
ggcuuagcuccagccucccggcggccucugca

SEQ ID NO: 420588 - RNA, 32 nt, Homo Sapiens
gaaaaacagaaaaagaaaaaauugucugaaau

SEQ ID NO: 420589 - RNA, 32 nt, Homo Sapiens
gccagaaaggccccgaucgaaaagccugggag

SEQ ID NO: 420590 - RNA, 32 nt, Homo Sapiens
agcugggcgugguggcgggcgccuguagcccc

SEQ ID NO: 420591 - RNA, 32 nt, Homo Sapiens
gagccugggaagcucauggcggagguggggcu

SEQ ID NO: 420592 - RNA, 32 nt, Homo Sapiens
aagacaaaggcacagcuggaugaauggaaagc

SEQ ID NO: 420593 - RNA, 32 nt, Homo Sapiens
aggacagccggccugcgccgggacaugcggcc

SEQ ID NO: 420594 - RNA, 32 nt, Homo Sapiens
caggaggagguaggggcugggcaugcaccuug

SEQ ID NO: 420595 - RNA, 31 nt, Homo Sapiens
agccaccagucccagaacccgccaaugcugg

SEQ ID NO: 420596 - RNA, 32 nt, Homo Sapiens
ugccuagacuccuaauaaagguauuucuuccu

SEQ ID NO: 420597 - RNA, 32 nt, Homo Sapiens
uuguuaacuuuaaauuuuuugagccugccuaa

SEQ ID NO: 420598 - RNA, 32 nt, Homo Sapiens
aagggacucauuccaaaccaauuccaaucgac

SEQ ID NO: 420599 - RNA, 32 nt, Homo Sapiens
cuuaagguuuucuagcacgacuugcggacauc

SEQ ID NO: 420600 - RNA, 32 nt, Homo Sapiens
gaccugaguugcugggaauuucugggucugac

SEQ ID NO: 420601 - RNA, 32 nt, Homo Sapiens
guuaugccacuacucauguugucuuagguacu

SEQ ID NO: 420602 - RNA, 32 nt, Homo Sapiens
ucccggcuugcgggcagucuccccucuccagg

SEQ ID NO: 420603 - RNA, 32 nt, Homo Sapiens
gugcagggcagagagugcggggggcgacaguc

SEQ ID NO: 420604 - RNA, 32 nt, Homo Sapiens
auuugagagauguaucaguuucuucugaagua

SEQ ID NO: 420605 - RNA, 32 nt, Homo Sapiens
aaacccuucugcgccugggcgggcgggucccg

SEQ ID NO: 420606 - RNA, 32 nt, Homo Sapiens
ucaucggcacuagcggguugggggugguggug

SEQ ID NO: 420607 - RNA, 32 nt, Homo Sapiens
aaucuuccaaaggauguuuucuuugugaccag

SEQ ID NO: 420608 - RNA, 30 nt, Homo Sapiens
gugcgcgcgauccagcaccauggggaagcg

SEQ ID NO: 420609 - RNA, 32 nt, Homo Sapiens
gccuuuacugagcucaggacuccagcuaaauc

SEQ ID NO: 420610 - RNA, 32 nt, Homo Sapiens
ugucucauugucuuucucuccccucaccaugc

SEQ ID NO: 420611 - RNA, 30 nt, Homo Sapiens
agcugggauaaaaggcgugagccaccgcgc

SEQ ID NO: 420612 - RNA, 32 nt, Homo Sapiens
aucccucuucuccauucucaccagcaccauca

SEQ ID NO: 420613 - RNA, 32 nt, Homo Sapiens
caguggcagucauggcggcucagugcgugagg

SEQ ID NO: 420614 - RNA, 32 nt, Homo Sapiens
ugacauuccuccccggccacacuccucaagac

SEQ ID NO: 420615 - RNA, 32 nt, Homo Sapiens
acuuuaauuuaaagaaaaguuguguucuguuu

SEQ ID NO: 420616 - RNA, 32 nt, Homo Sapiens
ccaccgagcuaggccgggaugggaucagaugg

SEQ ID NO: 420617 - RNA, 32 nt, Homo Sapiens
aggggagaggagaggacucagcgggccccguc

SEQ ID NO: 420618 - RNA, 32 nt, Homo Sapiens
gccaaugcacuccagccugggcgacagagaaa

SEQ ID NO: 420619 - RNA, 32 nt, Homo Sapiens
ggaauugcuuggauugauacauggacccccug

SEQ ID NO: 420620 - RNA, 32 nt, Homo Sapiens
gggggugucuguggagugcaugacucagcccc

SEQ ID NO: 420621 - RNA, 32 nt, Homo Sapiens
cgcguuucugcagcugcugcagucgccgcagc

SEQ ID NO: 420622 - RNA, 32 nt, Homo Sapiens
agccauuaucuucuuucugggugucuuaucaa

SEQ ID NO: 420623 - RNA, 32 nt, Homo Sapiens
uucauuaauggaucuugugaauggguugauug

SEQ ID NO: 420624 - RNA, 32 nt, Homo Sapiens
uguacucaucuuccuuuugaccuguuuccuca

SEQ ID NO: 420625 - RNA, 32 nt, Homo Sapiens
cugugguauaucagcugggcucccucggacgc

SEQ ID NO: 420626 - RNA, 32 nt, Homo Sapiens
cugauguauaauguaauguuuuuauuucaauu

SEQ ID NO: 420627 - RNA, 32 nt, Homo Sapiens
ucccagguucacgccauucucccgccucaacc

SEQ ID NO: 420628 - RNA, 29 nt, Homo Sapiens
uccuccuggggacagaaagaugucgucaa

SEQ ID NO: 420629 - RNA, 32 nt, Homo Sapiens
caagguaaagaagccagaaagguuaggcaaga

SEQ ID NO: 420630 - RNA, 32 nt, Homo Sapiens
cuuucauuguuuucuucaguacaaagaguauc

SEQ ID NO: 420631 - RNA, 32 nt, Homo Sapiens
cuuucaggaagucaaccaagacugaggaugug

SEQ ID NO: 420632 - RNA, 32 nt, Homo Sapiens
aaauucuccaggugaauggggaagggucuguu

SEQ ID NO: 420633 - RNA, 32 nt, Homo Sapiens
aaugugcuuuaaaauaugcuuaccuuuugaau

SEQ ID NO: 420634 - RNA, 32 nt, Homo Sapiens
cugggcauauggauuuaucuaucaccauuacu

SEQ ID NO: 420635 - RNA, 32 nt, Homo Sapiens
ccacaccagaucugggugccuugggagaacca

SEQ ID NO: 420636 - RNA, 32 nt, Homo Sapiens
guguuuggacagaacccaaauucuuuauuuuu

SEQ ID NO: 420637 - RNA, 32 nt, Homo Sapiens
ccccuuggccugcauguacaaacuucuacccu

SEQ ID NO: 420638 - RNA, 32 nt, Homo Sapiens
cucccauguaucauuacccagcaucaacuauu

SEQ ID NO: 420639 - RNA, 32 nt, Homo Sapiens
gcaaggaggucuuugcacaggaaaagggguag

SEQ ID NO: 420640 - RNA, 32 nt, Homo Sapiens
gcucuguauuaaaacaaauccaccaaacaaca

SEQ ID NO: 420641 - RNA, 32 nt, Homo Sapiens
gcccaccccguccauggugcuaagcgggcccg

SEQ ID NO: 420642 - RNA, 32 nt, Homo Sapiens
gaccgcgcccagccgcaggcgcaacuuuuuug

SEQ ID NO: 420643 - RNA, 32 nt, Homo Sapiens
uaauagagcucuuuguuccaguguuaucucuu

SEQ ID NO: 420644 - RNA, 30 nt, Homo Sapiens
gacccauggaggcgcgcggggagcugggcc

SEQ ID NO: 420645 - RNA, 32 nt, Homo Sapiens
aauaauagacauaauuaauucaauacacuacu

SEQ ID NO: 420646 - RNA, 32 nt, Homo Sapiens
aaaauagaauaaaauguugauaaggcacugcc

SEQ ID NO: 420647 - RNA, 32 nt, Homo Sapiens
uauuguauauuuuuuucuuaauguuuaaggaa

SEQ ID NO: 420648 - RNA, 32 nt, Homo Sapiens
ccuucaucugaaagauucucuucccuuguuag

SEQ ID NO: 420649 - RNA, 32 nt, Homo Sapiens
agaaauuuucuuuuugauuacuaguaccugua

SEQ ID NO: 420650 - RNA, 29 nt, Homo Sapiens
uugauuucaaaaguuuauuuucugugccu

SEQ ID NO: 420651 - RNA, 32 nt, Homo Sapiens
cuccgggaggcacagggcgcgcgaggugcagg

SEQ ID NO: 420652 - RNA, 32 nt, Homo Sapiens
ucagcacuacuauucucucuuaaaagauaagc

SEQ ID NO: 420653 - RNA, 32 nt, Homo Sapiens
ugcgccuuccuccgugacgccuucagccucuu

SEQ ID NO: 420654 - RNA, 32 nt, Homo Sapiens
uguauguccgugagaaauacaaugaagacggu

SEQ ID NO: 420655 - RNA, 32 nt, Homo Sapiens
agcgcccaccgccgucagccgcgucuucaagc

SEQ ID NO: 420656 - RNA, 32 nt, Homo Sapiens
agggggcuuugggacagggagggcccgggcgu

SEQ ID NO: 420657 - RNA, 32 nt, Homo Sapiens
cuguguggcuccugggccggcugaauggcagc

SEQ ID NO: 420658 - RNA, 32 nt, Homo Sapiens
agguucugcguggcugcccccagggggcccca

SEQ ID NO: 420659 - RNA, 32 nt, Homo Sapiens
acacugcagaccauggcagcaggcacuuggug

SEQ ID NO: 420660 - RNA, 32 nt, Homo Sapiens
caugugagcccugagagcugcagauguuuggc

SEQ ID NO: 420661 - RNA, 32 nt, Homo Sapiens
aagccuacuuuuucacuuuaaaugauuuauug

SEQ ID NO: 420662 - RNA, 32 nt, Homo Sapiens
acaaaguacaugcuaucagaaugaacuuuggu

SEQ ID NO: 420663 - RNA, 32 nt, Homo Sapiens
aguccugguuugauaucucaccagccauguga

SEQ ID NO: 420664 - RNA, 32 nt, Homo Sapiens
gauaauacucuguauucuuuauggaaaauguu

SEQ ID NO: 420665 - RNA, 32 nt, Homo Sapiens
gacuuaaaccccagccucccccguccauccag

SEQ ID NO: 420666 - RNA, 32 nt, Homo Sapiens
auguauaaaaggaaauggaaauagacuaugua

SEQ ID NO: 420667 - RNA, 32 nt, Homo Sapiens
ugguccaggaugcagggcuggugucacaggug

SEQ ID NO: 420668 - RNA, 32 nt, Homo Sapiens
uuccugccggugccuagggccgacggggacgc

SEQ ID NO: 420669 - RNA, 32 nt, Homo Sapiens
aguggcauuuucugacuucuuccuccuccucc

SEQ ID NO: 420670 - RNA, 32 nt, Homo Sapiens
cuggagcucgugugcccguccucggugcagag

SEQ ID NO: 420671 - RNA, 32 nt, Homo Sapiens
uguaccaaaaauacaaaaauuaauugggcaug

SEQ ID NO: 420672 - RNA, 32 nt, Homo Sapiens
aggaggcggcgggucuucgggccuaggcgagc

SEQ ID NO: 420673 - RNA, 31 nt, Homo Sapiens
accaguaauacauggucucuaacugaugauu

SEQ ID NO: 420674 - RNA, 32 nt, Homo Sapiens
gaagcaggugggaggcgggcggaggugcuugu

SEQ ID NO: 420675 - RNA, 32 nt, Homo Sapiens
agcgagacuaucucagaaacaaaacaaaacaa

SEQ ID NO: 420676 - RNA, 32 nt, Homo Sapiens
aucugaaggagagagucuuuuaacuuuagaau

SEQ ID NO: 420677 - RNA, 32 nt, Homo Sapiens
ugcgcgccucccaccuggcccgcaccaaguac

SEQ ID NO: 420678 - RNA, 32 nt, Homo Sapiens
gagcauuugugauuaauuaauuuauauaugaa

SEQ ID NO: 420679 - RNA, 32 nt, Homo Sapiens
auaacaaagugagagaaauuuauauuacuggc

SEQ ID NO: 420680 - RNA, 32 nt, Homo Sapiens
ucagcugaaagaugggugguacacuugccaag

SEQ ID NO: 420681 - RNA, 32 nt, Homo Sapiens
ggugggagccuguggcuuauggcuucacuuac

SEQ ID NO: 420682 - RNA, 32 nt, Homo Sapiens
uuacuuuuucccagccaccccucccccugaaa

SEQ ID NO: 420683 - RNA, 32 nt, Homo Sapiens
ugcagugaggauuuucuagcauguugcugcac

SEQ ID NO: 420684 - RNA, 32 nt, Homo Sapiens
uuugcucgcucuuccgaagcagcugccaacgc

SEQ ID NO: 420685 - RNA, 32 nt, Homo Sapiens
uuccuucacagcauuuacuuggagcucuuugu

SEQ ID NO: 420686 - RNA, 32 nt, Homo Sapiens
uggcauuuucuuuucaauguucuuauaagcaa

SEQ ID NO: 420687 - RNA, 32 nt, Homo Sapiens
uuuuuuaugccaucugucucaaaucaaagagu

SEQ ID NO: 420688 - RNA, 32 nt, Homo Sapiens
uuguggcuuugcccgcgcguugccagacucag

SEQ ID NO: 420689 - RNA, 32 nt, Homo Sapiens
ugaucuuuuuaauguccaaaauccauuucuua

SEQ ID NO: 420690 - RNA, 32 nt, Homo Sapiens
uuuuguuuuuuccuuuucagaauguuucuuau

SEQ ID NO: 420691 - RNA, 32 nt, Homo Sapiens
gcaggaggcgccucggcccaugccgaacaucc

SEQ ID NO: 420692 - RNA, 32 nt, Homo Sapiens
gccagucugccagcugaguccugguuuuggau

SEQ ID NO: 420693 - RNA, 32 nt, Homo Sapiens
ccucaaaaugaaauucaacuagaaauggaaaa

SEQ ID NO: 420694 - RNA, 32 nt, Homo Sapiens
ggggucuccgcggaggagguggaggaggcggc

SEQ ID NO: 420695 - RNA, 32 nt, Homo Sapiens
gggcugggccccaagacucagaugcucucaac

SEQ ID NO: 420696 - RNA, 32 nt, Homo Sapiens
aaauacuuacugaguucuuguaagagcuaaug

SEQ ID NO: 420697 - RNA, 32 nt, Homo Sapiens
uguggcaccagcuaacacggaucuggagaagc

SEQ ID NO: 420698 - RNA, 32 nt, Homo Sapiens
ugcacuccagcaugggugauggagagagauac

SEQ ID NO: 420699 - RNA, 32 nt, Homo Sapiens
cccugucucucauuaacagccaguagcuuauu

SEQ ID NO: 420700 - RNA, 32 nt, Homo Sapiens
ggccuccaacuggugggaacuggauuuugcgg

SEQ ID NO: 420701 - RNA, 30 nt, Homo Sapiens
gccacggaggcagggccgccggaugcugug

SEQ ID NO: 420702 - RNA, 32 nt, Homo Sapiens
auuuaagccaacccccuggcaagcauucugua

SEQ ID NO: 420703 - RNA, 32 nt, Homo Sapiens
cucggggcggcgggcuaacgcggccgcuuugu

SEQ ID NO: 420704 - RNA, 32 nt, Homo Sapiens
gugugauguuccccucccugucuguguccaug

SEQ ID NO: 420705 - RNA, 31 nt, Homo Sapiens
uggagcacccugagaaaguucacuccagggu

SEQ ID NO: 420706 - RNA, 32 nt, Homo Sapiens
cuggauggcaggaaggaagcaggugggaggcg

SEQ ID NO: 420707 - RNA, 30 nt, Homo Sapiens
cggacgcguggggucccgacgccucccgcc

SEQ ID NO: 420708 - RNA, 32 nt, Homo Sapiens
acuggaugaugaugauaugaauguagacagcc

SEQ ID NO: 420709 - RNA, 32 nt, Homo Sapiens
ggagcccacagccaccauuuccacuaggaggu

SEQ ID NO: 420710 - RNA, 32 nt, Homo Sapiens
ccguggugagaggauagcuuaagcccaggagu

SEQ ID NO: 420711 - RNA, 32 nt, Homo Sapiens
cucuccgagcuaggcccggccgagagcgccuu

SEQ ID NO: 420712 - RNA, 32 nt, Homo Sapiens
guggugguggaguucuuggaugacucagcccu

SEQ ID NO: 420713 - RNA, 32 nt, Homo Sapiens
gcucggcugcguccgcgcuaggcgcuuuuucc

SEQ ID NO: 420714 - RNA, 32 nt, Homo Sapiens
ucccgccgccccgcccccagccccacacaaga

SEQ ID NO: 420715 - RNA, 32 nt, Homo Sapiens
aggagcugccccuauggggcgggccgcagggc

SEQ ID NO: 420716 - RNA, 32 nt, Homo Sapiens
ggacucaugcaccucccggaugguuuuuguuu

SEQ ID NO: 420717 - RNA, 31 nt, Homo Sapiens
ugauucuuaaggagaaagugaaucauuggua

SEQ ID NO: 420718 - RNA, 32 nt, Homo Sapiens
aagaggaagaugccuagcacagaccuucugau

SEQ ID NO: 420719 - RNA, 32 nt, Homo Sapiens
ggcgccugccagcccccuccccucugcccagg

SEQ ID NO: 420720 - RNA, 32 nt, Homo Sapiens
uuuuucuggaaagaaaacuuucuuuacccacu

SEQ ID NO: 420721 - RNA, 32 nt, Homo Sapiens
guugugcuguggggaagggagaaggauuugua

SEQ ID NO: 420722 - RNA, 32 nt, Homo Sapiens
ccugagaacccccuccuccccucccccaauac

SEQ ID NO: 420723 - RNA, 32 nt, Homo Sapiens
gucucuacugaauaaauacaaaugguuccagc

SEQ ID NO: 420724 - RNA, 32 nt, Homo Sapiens
caaaagacugguuuguuugcuuaauuuccuuc

SEQ ID NO: 420725 - RNA, 32 nt, Homo Sapiens
cccaauccuaagcccugcgaggucuuguggaa

SEQ ID NO: 420726 - RNA, 32 nt, Homo Sapiens
uuaggggccgagugccuccggaugcuagacuc

SEQ ID NO: 420727 - RNA, 30 nt, Homo Sapiens
uaagaaggcaggccccaaagucucagcacc

SEQ ID NO: 420728 - RNA, 32 nt, Homo Sapiens
uuuuuuccucuccaccaagggcccguugaugu

SEQ ID NO: 420729 - RNA, 32 nt, Homo Sapiens
gauaccuccgccggugacccaggggcucugcg

SEQ ID NO: 420730 - RNA, 32 nt, Homo Sapiens
gugucuuaaggguaguggcaugagaucuuugg

SEQ ID NO: 420731 - RNA, 32 nt, Homo Sapiens
aacaggauccugagugguugcaggugaacaag

SEQ ID NO: 420732 - RNA, 32 nt, Homo Sapiens
uuccuugcugaauuggauuguugacuuguagu

SEQ ID NO: 420733 - RNA, 32 nt, Homo Sapiens
ugcugguucuucagucuuuguacuggccccau

SEQ ID NO: 420734 - RNA, 32 nt, Homo Sapiens
ugcagccucccuccgcggcgggcccugcccac

SEQ ID NO: 420735 - RNA, 32 nt, Homo Sapiens
gugaagagggacgagggaaaagaaacaaagcc

SEQ ID NO: 420736 - RNA, 32 nt, Homo Sapiens
uagcugggauuacaggcacgcgccaccacacc

SEQ ID NO: 420737 - RNA, 32 nt, Homo Sapiens
agaggguggguggaccccugcugcagggcaga

SEQ ID NO: 420738 - RNA, 32 nt, Homo Sapiens
caaagcugccuugacuguggccugcaaccacg

SEQ ID NO: 420739 - RNA, 32 nt, Homo Sapiens
uguuuuaauuguaggagaaauuuucucagcau

SEQ ID NO: 420740 - RNA, 30 nt, Homo Sapiens
aagccgggcaggcgagcgaaugacggagua

SEQ ID NO: 420741 - RNA, 32 nt, Homo Sapiens
aaaccaauucauuuuaaauaucagauuauuau

SEQ ID NO: 420742 - RNA, 31 nt, Homo Sapiens
ggugcuuugugcugaccgucagauuguguca

SEQ ID NO: 420743 - RNA, 32 nt, Homo Sapiens
gcuuaaaauuaaccuuuaccauuuaaugucau

SEQ ID NO: 420744 - RNA, 32 nt, Homo Sapiens
aucuuuuaagacagccacucaaguuuuagaag

SEQ ID NO: 420745 - RNA, 32 nt, Homo Sapiens
aauacuauauaccuaccucacagugggagggc

SEQ ID NO: 420746 - RNA, 32 nt, Homo Sapiens
uguuggaucaaaacuaaagaaaaaauauaaga

SEQ ID NO: 420747 - RNA, 32 nt, Homo Sapiens
aaggaggucugugccugaugggaaggcagagc

SEQ ID NO: 420748 - RNA, 32 nt, Homo Sapiens
augagugugcacauacaaauggggcagugugc

SEQ ID NO: 420749 - RNA, 32 nt, Homo Sapiens
acucagaacgcagaagcaggaaauggagaguu

SEQ ID NO: 420750 - RNA, 29 nt, Homo Sapiens
uuccaugacaacacgcuuuacagaugagc

SEQ ID NO: 420751 - RNA, 32 nt, Homo Sapiens
gaagcacacaauugacucucgucagcuggcac

SEQ ID NO: 420752 - RNA, 31 nt, Homo Sapiens
gagaaucucaaugauucuagaugacuucuug

SEQ ID NO: 420753 - RNA, 32 nt, Homo Sapiens
ugcuugaaggaacagugcuguucuggagcugc

SEQ ID NO: 420754 - RNA, 32 nt, Homo Sapiens
ucucugcuucccaguugcuauuccacaaaaga

SEQ ID NO: 420755 - RNA, 32 nt, Homo Sapiens
aauuagauaguuucuuuuuuuuuaaaaaaagu

SEQ ID NO: 420756 - RNA, 32 nt, Homo Sapiens
ggccuuuaaaugcaguaaacuccaccuaacca

SEQ ID NO: 420757 - RNA, 32 nt, Homo Sapiens
acuguguauguuuguuuggucaauguuuccgc

SEQ ID NO: 420758 - RNA, 32 nt, Homo Sapiens
cccgccuauucccccagcagcgucuucccgcc

SEQ ID NO: 420759 - RNA, 32 nt, Homo Sapiens
gcugcaaggauggaaggcagagggugggugug

SEQ ID NO: 420760 - RNA, 32 nt, Homo Sapiens
uccccagcucgccucccugccugugcuggccu

SEQ ID NO: 420761 - RNA, 32 nt, Homo Sapiens
aggcucugccuuggccuggccuuguccagucu

SEQ ID NO: 420762 - RNA, 32 nt, Homo Sapiens
cugccccugggaacugaaugucuccguauaaa

SEQ ID NO: 420763 - RNA, 32 nt, Homo Sapiens
augaagagguagaaacucuggaccucauuaau

SEQ ID NO: 420764 - RNA, 32 nt, Homo Sapiens
caaauacaaaaauuagcuggacgugguggugc

SEQ ID NO: 420765 - RNA, 32 nt, Homo Sapiens
cacgcuuguguccugggcgaugguaauaaaac

SEQ ID NO: 420766 - RNA, 32 nt, Homo Sapiens
gaguggcggguucgggcgcagcuguaggguug

SEQ ID NO: 420767 - RNA, 32 nt, Homo Sapiens
ccaguuucucuccugccucucaucuuucuaug

SEQ ID NO: 420768 - RNA, 32 nt, Homo Sapiens
ucuuugaagaaccccaggaaaacacacaaagg

SEQ ID NO: 420769 - RNA, 32 nt, Homo Sapiens
uaugaugggcuguucugggcaccuggaagcac

SEQ ID NO: 420770 - RNA, 32 nt, Homo Sapiens
agucucugaguaggcaggguccuccugggagg

SEQ ID NO: 420771 - RNA, 32 nt, Homo Sapiens
augcggaacaacauagucuaaaaaggaagaug

SEQ ID NO: 420772 - RNA, 32 nt, Homo Sapiens
caaaauuuguuuacuguugugaauuuuuccua

SEQ ID NO: 420773 - RNA, 32 nt, Homo Sapiens
cucuuugugggaauggaaggggacaguuugcu

SEQ ID NO: 420774 - RNA, 32 nt, Homo Sapiens
agcccuaaccgucucuccccagcccuauccgg

SEQ ID NO: 420775 - RNA, 32 nt, Homo Sapiens
gggaaaggagaaugcugcuugucaccuagagu

SEQ ID NO: 420776 - RNA, 32 nt, Homo Sapiens
agaagaugugcauaaugucugcucuuguguag

SEQ ID NO: 420777 - RNA, 32 nt, Homo Sapiens
cagaaagccucccuucuucuccagguccccuc

SEQ ID NO: 420778 - RNA, 32 nt, Homo Sapiens
ugcuggugugagggucugggcugcuggacuug

SEQ ID NO: 420779 - RNA, 27 nt, Homo Sapiens
cugcugccuugcuucagccaccucucc

SEQ ID NO: 420780 - RNA, 32 nt, Homo Sapiens
uuuggagugaaccuuggaaaauuuauaauuau

SEQ ID NO: 420781 - RNA, 32 nt, Homo Sapiens
auuuuuaucuaaaugcagaaacuuauuaauga

SEQ ID NO: 420782 - RNA, 32 nt, Homo Sapiens
aauuugggucccuuccuccccagccccauuuu

SEQ ID NO: 420783 - RNA, 30 nt, Homo Sapiens
auuauccaugcucauuuuugcuaggggaaa

SEQ ID NO: 420784 - RNA, 32 nt, Homo Sapiens
agauauccagaaaaaucaugaagcaaaagaaa

SEQ ID NO: 420785 - RNA, 32 nt, Homo Sapiens
ucagauaauuuucaccaguuuuuauuuggagc

SEQ ID NO: 420786 - RNA, 32 nt, Homo Sapiens
uuuugagagagauauuuuugggacauuauuuu

SEQ ID NO: 420787 - RNA, 32 nt, Homo Sapiens
uuagcggauauguuuauacagaugaauauaaa

SEQ ID NO: 420788 - RNA, 32 nt, Homo Sapiens
uaaucaaaguuaguuuuuuguuuucugguuug

SEQ ID NO: 420789 - RNA, 31 nt, Homo Sapiens
cugguggguggcacucucaggugcuccugaa

SEQ ID NO: 420790 - RNA, 32 nt, Homo Sapiens
uucaucugcugcgcucugaggacccugaccag

SEQ ID NO: 420791 - RNA, 32 nt, Homo Sapiens
agauggugucauuugaucaaagaauuuugcua

SEQ ID NO: 420792 - RNA, 32 nt, Homo Sapiens
uggccccagggagaggccucuggaggcaaggg

SEQ ID NO: 420793 - RNA, 32 nt, Homo Sapiens
cuguaaauggcuucuuucugggguguggaaau

SEQ ID NO: 420794 - RNA, 32 nt, Homo Sapiens
caaaccagcugaugaagaacugcugccaggug

SEQ ID NO: 420795 - RNA, 32 nt, Homo Sapiens
ggcugcgagcgcgaggcggcgcggauucgcgg

SEQ ID NO: 420796 - RNA, 32 nt, Homo Sapiens
uuuugaaguuuugguccuuacccaggcagccc

SEQ ID NO: 420797 - RNA, 32 nt, Homo Sapiens
gaaguuggaaauaaauaaaagcauaaucacua

SEQ ID NO: 420798 - RNA, 32 nt, Homo Sapiens
uuccuuguucagcagaggagccuggucccauu

SEQ ID NO: 420799 - RNA, 32 nt, Homo Sapiens
cccuacacucccucucugagccuccgucgccc

SEQ ID NO: 420800 - RNA, 29 nt, Homo Sapiens
aagauuuaaaguuucaaaguuuuuuguuc

SEQ ID NO: 420801 - RNA, 32 nt, Homo Sapiens
gccaggacuuguuaaaaagaucaauagauugc

SEQ ID NO: 420802 - RNA, 32 nt, Homo Sapiens
gaacuuuguucuagauuccuuaaaagucggua

SEQ ID NO: 420803 - RNA, 32 nt, Homo Sapiens
auguaccaaugaugaauuuaucagcguauuuc

SEQ ID NO: 420804 - RNA, 32 nt, Homo Sapiens
uccagaccggagacgucgcugcagguccucug

SEQ ID NO: 420805 - RNA, 32 nt, Homo Sapiens
gguggucagagcauugugggagggaucugggg

SEQ ID NO: 420806 - RNA, 32 nt, Homo Sapiens
guaccuggcccggcgcggcgacugcucuccgg

SEQ ID NO: 420807 - RNA, 32 nt, Homo Sapiens
aggaaacaucagaauuacuaaucuagcuagug

SEQ ID NO: 420808 - RNA, 32 nt, Homo Sapiens
cucauccguuugccaaucauugcaaacaacug

SEQ ID NO: 420809 - RNA, 32 nt, Homo Sapiens
ucuagggaugaaaucaacuucugauuuuguua

SEQ ID NO: 420810 - RNA, 32 nt, Homo Sapiens
agggaggcugcuacucuaccacuuccugugug

SEQ ID NO: 420811 - RNA, 32 nt, Homo Sapiens
aaagaauuuggaaaaucugauggugugagcag

SEQ ID NO: 420812 - RNA, 30 nt, Homo Sapiens
uaaauaaaaacuaagcacuucuggagacau

SEQ ID NO: 420813 - RNA, 32 nt, Homo Sapiens
uccagaggugcagcugccgaaagugccagaga

SEQ ID NO: 420814 - RNA, 32 nt, Homo Sapiens
ucaugcuuggaacagcauuuccacuagagaau

SEQ ID NO: 420815 - RNA, 32 nt, Homo Sapiens
aacuuagaaaaaagcuguaugaacugcuuuac

SEQ ID NO: 420816 - RNA, 32 nt, Homo Sapiens
cguuccuuuacauccugcacuuucucaggaag

SEQ ID NO: 420817 - RNA, 32 nt, Homo Sapiens
uccaggauuuuuauucgucgcuuauuuuaugc

SEQ ID NO: 420818 - RNA, 32 nt, Homo Sapiens
ccaugaccuuguccugccccagccucacggac

SEQ ID NO: 420819 - RNA, 32 nt, Homo Sapiens
uguuaggcaaauacacauuaauaagaaugccu

SEQ ID NO: 420820 - RNA, 32 nt, Homo Sapiens
ccacuuucaaaucaaugucaguagacauugau

SEQ ID NO: 420821 - RNA, 32 nt, Homo Sapiens
gggacaggagggggcaccuucuccagaugaug

SEQ ID NO: 420822 - RNA, 32 nt, Homo Sapiens
cugucucggccucccggguggcugggauugca

SEQ ID NO: 420823 - RNA, 32 nt, Homo Sapiens
ccugggggucuucgugcgccccggggcugcag

SEQ ID NO: 420824 - RNA, 32 nt, Homo Sapiens
guucggagagauuuuucuuaaggaagcagaag

SEQ ID NO: 420825 - RNA, 32 nt, Homo Sapiens
augagcuggcgggauugaaggaugcugucuuc

SEQ ID NO: 420826 - RNA, 32 nt, Homo Sapiens
auuccccucugcugcugucccucccccuuguc

SEQ ID NO: 420827 - RNA, 32 nt, Homo Sapiens
aaaacauaggacuuagaauguuaauguacaag

SEQ ID NO: 420828 - RNA, 32 nt, Homo Sapiens
ccagugacggucuggucuugcaggcagaggcc

SEQ ID NO: 420829 - RNA, 32 nt, Homo Sapiens
cguauuccgagcucucuggaaagagaggagac

SEQ ID NO: 420830 - RNA, 32 nt, Homo Sapiens
gcggagccagacgcugcccccggcgcggggag

SEQ ID NO: 420831 - RNA, 32 nt, Homo Sapiens
guagugugagcucuuguuuuugaaaugauugc

SEQ ID NO: 420832 - RNA, 32 nt, Homo Sapiens
gaaucuggacaggggagggagauacuauagaa

SEQ ID NO: 420833 - RNA, 32 nt, Homo Sapiens
cgccgcgcuccagcagcugcugccgcccagcc

SEQ ID NO: 420834 - RNA, 32 nt, Homo Sapiens
cgguccucucugcagcucccagcccucaacuc

SEQ ID NO: 420835 - RNA, 32 nt, Homo Sapiens
gaugcaaacuguuauguaaaucugagauuuca

SEQ ID NO: 420836 - RNA, 32 nt, Homo Sapiens
gcaccaaggccagcagcugccccuagggaucc

SEQ ID NO: 420837 - RNA, 32 nt, Homo Sapiens
aggaaagaaaaguaagucagggaaauauuaaa

SEQ ID NO: 420838 - RNA, 32 nt, Homo Sapiens
gcccuuugggcuggagaugcuuugccagacua

SEQ ID NO: 420839 - RNA, 32 nt, Homo Sapiens
gggaagagcugaugugguguggccugcccaua

SEQ ID NO: 420840 - RNA, 32 nt, Homo Sapiens
aggaaaguuugccaggaggaacaaagagauug

SEQ ID NO: 420841 - RNA, 32 nt, Homo Sapiens
accaaagucccugcccucgaggagcuuucauu

SEQ ID NO: 420842 - RNA, 32 nt, Homo Sapiens
caccccucucugagggcuguuguucugcuucc

SEQ ID NO: 420843 - RNA, 32 nt, Homo Sapiens
ggcggccggagccccagcaucccugcuugagg

SEQ ID NO: 420844 - RNA, 32 nt, Homo Sapiens
uaaaccuuuagaaaaaacuucuggagagaaau

SEQ ID NO: 420845 - RNA, 30 nt, Homo Sapiens
ccccgcaggggaaggcggguccuggcggcc

SEQ ID NO: 420846 - RNA, 32 nt, Homo Sapiens
aaguuggagaagguguggcaguccucauuucu

SEQ ID NO: 420847 - RNA, 32 nt, Homo Sapiens
aaaucacacauuuaaaaaaucuguagaauuua

SEQ ID NO: 420848 - RNA, 32 nt, Homo Sapiens
cucaguuacccuggaaggauguguguguugga

SEQ ID NO: 420849 - RNA, 32 nt, Homo Sapiens
caccgacccgccaccugccaccucugacggag

SEQ ID NO: 420850 - RNA, 32 nt, Homo Sapiens
ucgccucguuccggccuccgcggcccagcaac

SEQ ID NO: 420851 - RNA, 32 nt, Homo Sapiens
gagucugaaccuauuucuuaaacacuugcaac

SEQ ID NO: 420852 - RNA, 32 nt, Homo Sapiens
agguacaggccggcgccagccgugccucacca

SEQ ID NO: 420853 - RNA, 32 nt, Homo Sapiens
uccucgaccugcgacggggucuccaugagcac

SEQ ID NO: 420854 - RNA, 32 nt, Homo Sapiens
cuccagccauacagaaaccaacacuguguggg

SEQ ID NO: 420855 - RNA, 32 nt, Homo Sapiens
gccguucucugaggccuucucucugccuacca

SEQ ID NO: 420856 - RNA, 32 nt, Homo Sapiens
cuguaguuuguuucuuuuuauuaccaaguacu

SEQ ID NO: 420857 - RNA, 32 nt, Homo Sapiens
ucugucacucuacuagggaugaaacagcuaau

SEQ ID NO: 420858 - RNA, 32 nt, Homo Sapiens
aggcaaucaaugauagguuuauaaucuuagau

SEQ ID NO: 420859 - RNA, 32 nt, Homo Sapiens
cuuuagcaauaccaccagacuaguuagaguuc

SEQ ID NO: 420860 - RNA, 32 nt, Homo Sapiens
cauuuccauucgucuguagcuucuauccccaa

SEQ ID NO: 420861 - RNA, 32 nt, Homo Sapiens
uucuacugucuaauucauuacauuuuuucagc

SEQ ID NO: 420862 - RNA, 32 nt, Homo Sapiens
cucuucucccagucuucagucuuaagucguua

SEQ ID NO: 420863 - RNA, 32 nt, Homo Sapiens
caaguaacccucaaaauguaaauucaagaaac

SEQ ID NO: 420864 - RNA, 32 nt, Homo Sapiens
ugagaagauugugaauauuuccauauggauuu

SEQ ID NO: 420865 - RNA, 32 nt, Homo Sapiens
cccaaccagccgaacgccgccggcgucagcag

SEQ ID NO: 420866 - RNA, 32 nt, Homo Sapiens
uggcucacaccuguaucccaacacuuugggag

SEQ ID NO: 420867 - RNA, 32 nt, Homo Sapiens
caccguccaggccgccgagagccccucugccu

SEQ ID NO: 420868 - RNA, 32 nt, Homo Sapiens
agcacauuuccucugcuucuuuuaucauauuu

SEQ ID NO: 420869 - RNA, 32 nt, Homo Sapiens
gcugcggcgggaagauggcggagcugcgcgug

SEQ ID NO: 420870 - RNA, 32 nt, Homo Sapiens
uggcugccaugagaccugaggaccacacuugg

SEQ ID NO: 420871 - RNA, 32 nt, Homo Sapiens
cagggguuaguagcuuccucuugcuaacuuuu

SEQ ID NO: 420872 - RNA, 32 nt, Homo Sapiens
auugagauaaccugcaaagacauaacaguauu

SEQ ID NO: 420873 - RNA, 32 nt, Homo Sapiens
cugucccgggggaccguguccucccccauguc

SEQ ID NO: 420874 - RNA, 32 nt, Homo Sapiens
caccuugcuuugcacugacgcaaacccggccu

SEQ ID NO: 420875 - RNA, 32 nt, Homo Sapiens
uuuuguuaaaauugaauugucaguacuuuacu

SEQ ID NO: 420876 - RNA, 32 nt, Homo Sapiens
gauuucaccauguuggcuaggcuggucuugaa

SEQ ID NO: 420877 - RNA, 32 nt, Homo Sapiens
gaccucagaugugccccagaucaaugaugccc

SEQ ID NO: 420878 - RNA, 32 nt, Homo Sapiens
uccagauuuauuuuggaaauagauuugaauga

SEQ ID NO: 420879 - RNA, 32 nt, Homo Sapiens
cuuucgcaauuuucuuuuucaauuucauaauu

SEQ ID NO: 420880 - RNA, 32 nt, Homo Sapiens
cugagguugaacucuuuuuuuuguugcucaag

SEQ ID NO: 420881 - RNA, 32 nt, Homo Sapiens
acaauuugaaaaacuuugcagaugagccacau

SEQ ID NO: 420882 - RNA, 32 nt, Homo Sapiens
ccuuuuagguagugccuuaucucuauuacuag

SEQ ID NO: 420883 - RNA, 30 nt, Homo Sapiens
cucugcggauucccugccugaccuugggaa

SEQ ID NO: 420884 - RNA, 32 nt, Homo Sapiens
ucucuggcauauuagacuuuuauuuuuucccc

SEQ ID NO: 420885 - RNA, 32 nt, Homo Sapiens
cacacaggggagaggcgaggucgauggaacug

SEQ ID NO: 420886 - RNA, 32 nt, Homo Sapiens
cccugaaguccucacccaaacuuugcgaugac

SEQ ID NO: 420887 - RNA, 30 nt, Homo Sapiens
ggggcugucuguguguacgugugcagggga

SEQ ID NO: 420888 - RNA, 32 nt, Homo Sapiens
ugcacccagcaaaaacagcagucaugguuagg

SEQ ID NO: 420889 - RNA, 32 nt, Homo Sapiens
cgggugugagucagcucugucucugggguggu

SEQ ID NO: 420890 - RNA, 32 nt, Homo Sapiens
ccgcgcgccccagcaccaugcggccgcccugc

SEQ ID NO: 420891 - RNA, 32 nt, Homo Sapiens
guggggcaggacggugacugcagaccugucua

SEQ ID NO: 420892 - RNA, 32 nt, Homo Sapiens
auuaacauaaaauuauauuaauaaguagauau

SEQ ID NO: 420893 - RNA, 32 nt, Homo Sapiens
caaagcccgcaugugugaugcccaccuucgag

SEQ ID NO: 420894 - RNA, 32 nt, Homo Sapiens
augugccugugagcuaugugugaauguguaua

SEQ ID NO: 420895 - RNA, 32 nt, Homo Sapiens
aucuccugcaccgucccuguagcacuggaggu

SEQ ID NO: 420896 - RNA, 32 nt, Homo Sapiens
gagcauccuaggaaaucacagauuguuaaagg

SEQ ID NO: 420897 - RNA, 32 nt, Homo Sapiens
uuuacauguccuaguuugauaauguugauuca

SEQ ID NO: 420898 - RNA, 32 nt, Homo Sapiens
auuuugcacuggcccccuggcuccccaccuuu

SEQ ID NO: 420899 - RNA, 32 nt, Homo Sapiens
gagcgccugcgucgcuucaucucccaggagcu

SEQ ID NO: 420900 - RNA, 32 nt, Homo Sapiens
aaugaaaaacauccuggaauugugaauucccc

SEQ ID NO: 420901 - RNA, 32 nt, Homo Sapiens
accgcgcccgccucgccucccgcggcugccag

SEQ ID NO: 420902 - RNA, 32 nt, Homo Sapiens
ggugggauucgaacgcagaugggguuuggagc

SEQ ID NO: 420903 - RNA, 32 nt, Homo Sapiens
ggcuccaauauuucguucucuccccauggggc

SEQ ID NO: 420904 - RNA, 32 nt, Homo Sapiens
uagauccccacuugcuuuccaccaggauaucc

SEQ ID NO: 420905 - RNA, 32 nt, Homo Sapiens
gagacaccgcggcgaaugcagaugacugcacc

SEQ ID NO: 420906 - RNA, 32 nt, Homo Sapiens
aguguucuguuuccaguucauaauguauuguu

SEQ ID NO: 420907 - RNA, 32 nt, Homo Sapiens
cugucgcgcuggaagcgcuaccacaucaaggu

SEQ ID NO: 420908 - RNA, 32 nt, Homo Sapiens
gucgguggccccgaugggccagggcaggaggc

SEQ ID NO: 420909 - RNA, 32 nt, Homo Sapiens
cauuacacuccagccugggugacagagugaga

SEQ ID NO: 420910 - RNA, 32 nt, Homo Sapiens
cagccauccacaccacccacgucacaaauuua

SEQ ID NO: 420911 - RNA, 31 nt, Homo Sapiens
ucaggacagcgcagccggccccuguggucgc

SEQ ID NO: 420912 - RNA, 32 nt, Homo Sapiens
uguccaaaaugaagcauccccgugacaaacca

SEQ ID NO: 420913 - RNA, 32 nt, Homo Sapiens
guacuucgugugcuccgacccauggugacgau

SEQ ID NO: 420914 - RNA, 32 nt, Homo Sapiens
cccagccucgaccuagcccacccucucagggc

SEQ ID NO: 420915 - RNA, 32 nt, Homo Sapiens
ccgcucugccagcccucacugcugcccgucau

SEQ ID NO: 420916 - RNA, 32 nt, Homo Sapiens
cacugcauucggcagagcuccagugagcaagg

SEQ ID NO: 420917 - RNA, 32 nt, Homo Sapiens
aacgccuucuugcaugaggggauugaacuaua

SEQ ID NO: 420918 - RNA, 32 nt, Homo Sapiens
ccugcuaauauccagcaagcuaucaagucugc

SEQ ID NO: 420919 - RNA, 30 nt, Homo Sapiens
gggcaaggcaggcgccaugacccugauuga

SEQ ID NO: 420920 - RNA, 32 nt, Homo Sapiens
aggacaggugugacacagccacagcagaggca

SEQ ID NO: 420921 - RNA, 32 nt, Homo Sapiens
gacugagucucauucuaucacccaggcuggag

SEQ ID NO: 420922 - RNA, 32 nt, Homo Sapiens
augugaagauggcggagcugcagaugcugcug

SEQ ID NO: 420923 - RNA, 30 nt, Homo Sapiens
agagaguguuugagagcagaagcuauggca

SEQ ID NO: 420924 - RNA, 32 nt, Homo Sapiens
gggcuggaguccuugcuuugcugcugcugagc

SEQ ID NO: 420925 - RNA, 31 nt, Homo Sapiens
cagggggugggcugccugccugcucugagcu

SEQ ID NO: 420926 - RNA, 32 nt, Homo Sapiens
caaagcuuuaauuuauacuaagcuuaggaagu

SEQ ID NO: 420927 - RNA, 32 nt, Homo Sapiens
ugggaggucaagaugggaggauugcuugagcc

SEQ ID NO: 420928 - RNA, 32 nt, Homo Sapiens
caccagcccugcguggacguggccugugcuuc

SEQ ID NO: 420929 - RNA, 32 nt, Homo Sapiens
gaggagcuccagccgcgcucucucccggcagu

SEQ ID NO: 420930 - RNA, 32 nt, Homo Sapiens
auucaugagcuggucagcguuucgucucuuua

SEQ ID NO: 420931 - RNA, 32 nt, Homo Sapiens
aacuuaaaaauggugauugaagcaaaauaugu

SEQ ID NO: 420932 - RNA, 29 nt, Homo Sapiens
ucugauguuucauaaagcgcuuuauuuaa

SEQ ID NO: 420933 - RNA, 32 nt, Homo Sapiens
acauauugaaagauauauuuuagacuuauuag

SEQ ID NO: 420934 - RNA, 32 nt, Homo Sapiens
aauugugccaaggaagccaaaagggaagacag

SEQ ID NO: 420935 - RNA, 32 nt, Homo Sapiens
gccccucuaagagugcacacacacgcacacaa

SEQ ID NO: 420936 - RNA, 32 nt, Homo Sapiens
agguggcccucccaggcugguauuuaucugca

SEQ ID NO: 420937 - RNA, 32 nt, Homo Sapiens
ccacuggucugugcacauccacggugggugag

SEQ ID NO: 420938 - RNA, 32 nt, Homo Sapiens
acuacaaaagguuacauagauaugaaaagauu

SEQ ID NO: 420939 - RNA, 32 nt, Homo Sapiens
uuucauaaguugaguacuaauguccuguuuuu

SEQ ID NO: 420940 - RNA, 32 nt, Homo Sapiens
ucggggcugaugcagaugcugcugcugaaggu

SEQ ID NO: 420941 - RNA, 32 nt, Homo Sapiens
uucuuaaugaaaagcuuagaaaacacaugaau

SEQ ID NO: 420942 - RNA, 31 nt, Homo Sapiens
ccuucuaggaagaaaaacuaugaugauguua

SEQ ID NO: 420943 - RNA, 32 nt, Homo Sapiens
gaccuggugggaagaaggugcggggacggguc

SEQ ID NO: 420944 - RNA, 32 nt, Homo Sapiens
aacgguguaauugggugagcuuccaaauaaag

SEQ ID NO: 420945 - RNA, 32 nt, Homo Sapiens
cacccaaacuuguauauuuauuacaauuuucu

SEQ ID NO: 420946 - RNA, 32 nt, Homo Sapiens
caggauggagugucuguaaaaucaacaggaaa

SEQ ID NO: 420947 - RNA, 32 nt, Homo Sapiens
ucuuaaagauaaaagguacuauuauauaaccu

SEQ ID NO: 420948 - RNA, 32 nt, Homo Sapiens
auguuuccccugaaggacgcugaaaugggagc

SEQ ID NO: 420949 - RNA, 32 nt, Homo Sapiens
aacagaaaacaucagggagauguacaaugaug

SEQ ID NO: 420950 - RNA, 31 nt, Homo Sapiens
agggcugcugccucagcuccaagacaagaau

SEQ ID NO: 420951 - RNA, 32 nt, Homo Sapiens
caggguuagaaaaauugguauaaguuccuaau

SEQ ID NO: 420952 - RNA, 32 nt, Homo Sapiens
gugguggcggcgggcggcgggcggcaaaggag

SEQ ID NO: 420953 - RNA, 32 nt, Homo Sapiens
uccaagaauuguaaacagaacaaaaugaguga

SEQ ID NO: 420954 - RNA, 32 nt, Homo Sapiens
uguaagaaaaugauugcuuaucaguaguauca

SEQ ID NO: 420955 - RNA, 32 nt, Homo Sapiens
cagagagugucuggaagcugcuguugccaucu

SEQ ID NO: 420956 - RNA, 32 nt, Homo Sapiens
uuacacaggaccaccuugcuguuugaugcucc

SEQ ID NO: 420957 - RNA, 32 nt, Homo Sapiens
auauacuucuggauggcguuaagauuucagga

SEQ ID NO: 420958 - RNA, 32 nt, Homo Sapiens
aauuauucuguauugcaacuuuucucagagau

SEQ ID NO: 420959 - RNA, 32 nt, Homo Sapiens
uugucuagguagucagucugcacuuaaauauc

SEQ ID NO: 420960 - RNA, 32 nt, Homo Sapiens
cagaggcgcaggagcccucccuccccaccccc

SEQ ID NO: 420961 - RNA, 32 nt, Homo Sapiens
agugggccuggggucccgggagggauuccgga

SEQ ID NO: 420962 - RNA, 32 nt, Homo Sapiens
ugccuugagcacuucuuuuauuucauauagga

SEQ ID NO: 420963 - RNA, 32 nt, Homo Sapiens
aaaagcccggugggcucugagucuucugggaa

SEQ ID NO: 420964 - RNA, 32 nt, Homo Sapiens
gugccgcggggccggcaaaggcaccgagcugg

SEQ ID NO: 420965 - RNA, 32 nt, Homo Sapiens
guguggccagaagaaccccccaucccaagacu

SEQ ID NO: 420966 - RNA, 32 nt, Homo Sapiens
cgccccgagccccucuccggcuccucaacaga

SEQ ID NO: 420967 - RNA, 32 nt, Homo Sapiens
gguucgcccucccuagcauuaguugucacuuu

SEQ ID NO: 420968 - RNA, 28 nt, Homo Sapiens
gccaugggguucccggccgcggcgcugc

SEQ ID NO: 420969 - RNA, 32 nt, Homo Sapiens
gccauguuauuuauaguguugcuuuccuugug

SEQ ID NO: 420970 - RNA, 32 nt, Homo Sapiens
acuucggaguuggggguggucagacaccacag

SEQ ID NO: 420971 - RNA, 32 nt, Homo Sapiens
ccaggcaggggccuuccaggaugccuggugcc

SEQ ID NO: 420972 - RNA, 31 nt, Homo Sapiens
cucucagccgccgcucugccccgcagcagcc

SEQ ID NO: 420973 - RNA, 32 nt, Homo Sapiens
uuuaugaacuauauuucucauugcacucugua

SEQ ID NO: 420974 - RNA, 30 nt, Homo Sapiens
ccgggaugcggcccgcagccggcgcagcca

SEQ ID NO: 420975 - RNA, 32 nt, Homo Sapiens
acugcccagcucacugcccccaguguccaggc

SEQ ID NO: 420976 - RNA, 30 nt, Homo Sapiens
caaugccaggcuguuguagaagcuccuggg

SEQ ID NO: 420977 - RNA, 32 nt, Homo Sapiens
ccaggccucagguguugucuuuugugcugugu

SEQ ID NO: 420978 - RNA, 32 nt, Homo Sapiens
cauguuggcucuguccgcauggcggaaugcau

SEQ ID NO: 420979 - RNA, 32 nt, Homo Sapiens
uuacugauaacugcagaugucucuacuuuguu

SEQ ID NO: 420980 - RNA, 32 nt, Homo Sapiens
uagccgucaagcgccaggugcucugcuaccag

SEQ ID NO: 420981 - RNA, 31 nt, Homo Sapiens
uucaaguuuacugcgaaguccacccagcguu

SEQ ID NO: 420982 - RNA, 29 nt, Homo Sapiens
auuauuuccauccaauauuuaaagacuug

SEQ ID NO: 420983 - RNA, 32 nt, Homo Sapiens
ccuguguuuguggcucccacuccccagccccc

SEQ ID NO: 420984 - RNA, 32 nt, Homo Sapiens
cagcacagaucaaugaaaccagcagauaaucc

SEQ ID NO: 420985 - RNA, 32 nt, Homo Sapiens
ggcgucuucucgcgcggauggugaagcugaau

SEQ ID NO: 420986 - RNA, 32 nt, Homo Sapiens
uccugauccaauggagaaagaaagccauuuuu

SEQ ID NO: 420987 - RNA, 32 nt, Homo Sapiens
acuacaggcgcgcgccgccacgcccggcuaau

SEQ ID NO: 420988 - RNA, 32 nt, Homo Sapiens
cccguuugauucuccuagcaccucccuuggag

SEQ ID NO: 420989 - RNA, 32 nt, Homo Sapiens
auccccgagcgcuaccuccccggagcggagca

SEQ ID NO: 420990 - RNA, 29 nt, Homo Sapiens
caguggugacaucucaguuugggaagugg

SEQ ID NO: 420991 - RNA, 32 nt, Homo Sapiens
ucauucaauuuaaguauauuuguaaggagcua

SEQ ID NO: 420992 - RNA, 32 nt, Homo Sapiens
gccagccugggcaacauagugagacccccauc

SEQ ID NO: 420993 - RNA, 32 nt, Homo Sapiens
cagccuuggaccuguucacguugccacagaau

SEQ ID NO: 420994 - RNA, 27 nt, Homo Sapiens
ccuggcccugaauucugguaacggaua

SEQ ID NO: 420995 - RNA, 32 nt, Homo Sapiens
cugggaaacagauccaaggaaauaucagccag

SEQ ID NO: 420996 - RNA, 32 nt, Homo Sapiens
cgaggccuggggaaggggacucaggggcgagg

SEQ ID NO: 420997 - RNA, 32 nt, Homo Sapiens
agcggcggcgagccagcacccgggccggcuaa

SEQ ID NO: 420998 - RNA, 32 nt, Homo Sapiens
gcauaaagaaggaaaauuggccaucuuuccca

SEQ ID NO: 420999 - RNA, 32 nt, Homo Sapiens
ggaaaaaagugaaaauaacaaaaaagaaaauc

SEQ ID NO: 421000 - RNA, 32 nt, Homo Sapiens
uauuauggaaaacaguauggaauuuccucaaa

SEQ ID NO: 421001 - RNA, 32 nt, Homo Sapiens
cugggcuagguagaaaaagggucaaugcuauu

SEQ ID NO: 421002 - RNA, 32 nt, Homo Sapiens
uggggcacccugccuuccugggaccugucgua

SEQ ID NO: 421003 - RNA, 32 nt, Homo Sapiens
ccaaggaaguagagaacauuccugucacauuc

SEQ ID NO: 421004 - RNA, 32 nt, Homo Sapiens
accuugaggggucgcugcuugagggcucuuau

SEQ ID NO: 421005 - RNA, 32 nt, Homo Sapiens
cugaggucaggaguucaagacuggccugauca

SEQ ID NO: 421006 - RNA, 32 nt, Homo Sapiens
gccuggcucacccaccugguggagagaguaga

SEQ ID NO: 421007 - RNA, 32 nt, Homo Sapiens
gugcuuucuuccccggcagaguuuuucgagcu

SEQ ID NO: 421008 - RNA, 32 nt, Homo Sapiens
gugcaaagggagguagugugggaaaaguguuu

SEQ ID NO: 421009 - RNA, 32 nt, Homo Sapiens
caggggcguaagggcuggguuuggccauacaa

SEQ ID NO: 421010 - RNA, 32 nt, Homo Sapiens
gccgcggagcugagccgaguggaggcuggaau

SEQ ID NO: 421011 - RNA, 32 nt, Homo Sapiens
ccaaucccggagccggcgcagaugaggcaguu

SEQ ID NO: 421012 - RNA, 32 nt, Homo Sapiens
auauuaacaaaauaaaucaaguugugguauag

SEQ ID NO: 421013 - RNA, 32 nt, Homo Sapiens
uagugucaucuuucccauugaaaugacuguga

SEQ ID NO: 421014 - RNA, 32 nt, Homo Sapiens
agugucugccccccaccuuccaguaucuccug

SEQ ID NO: 421015 - RNA, 32 nt, Homo Sapiens
acagcaggaacuggcuaugagcagaagguucg

SEQ ID NO: 421016 - RNA, 32 nt, Homo Sapiens
agacuccuggaaagucuguccuucgcugauuc

SEQ ID NO: 421017 - RNA, 32 nt, Homo Sapiens
guuugaccgagggaaggaaaagaaaauuaaaa

SEQ ID NO: 421018 - RNA, 32 nt, Homo Sapiens
auguaugcaacacuaauauaaauuauuccaag

SEQ ID NO: 421019 - RNA, 32 nt, Homo Sapiens
uagccauauaucauaaaccaacacaguaauug

SEQ ID NO: 421020 - RNA, 32 nt, Homo Sapiens
ugaugaugaugaugaugaugauaucuagaacu

SEQ ID NO: 421021 - RNA, 32 nt, Homo Sapiens
gguggcccagagagggcugugccuuacccagu

SEQ ID NO: 421022 - RNA, 32 nt, Homo Sapiens
ugaacagaaauuuuggaacuaauuauacucau

SEQ ID NO: 421023 - RNA, 32 nt, Homo Sapiens
agaguaaaaagaaaacaaaaccaaaaguuauu

SEQ ID NO: 421024 - RNA, 32 nt, Homo Sapiens
augauggugggagggggcaacccccaguagcu

SEQ ID NO: 421025 - RNA, 32 nt, Homo Sapiens
uggguggaacuuucuuuuuuauuuuauaggga

SEQ ID NO: 421026 - RNA, 32 nt, Homo Sapiens
ccucagccacccaaguagcugggaccacaggu

SEQ ID NO: 421027 - RNA, 32 nt, Homo Sapiens
ugcacucugauccacccugcacaccacugaga

SEQ ID NO: 421028 - RNA, 32 nt, Homo Sapiens
ggcccugaggccugggaguccuggacugagaa

SEQ ID NO: 421029 - RNA, 32 nt, Homo Sapiens
ucucccugguguccggugaccucccccagggc

SEQ ID NO: 421030 - RNA, 32 nt, Homo Sapiens
uccaggcugucaugugauuuaugguggcaugu

SEQ ID NO: 421031 - RNA, 32 nt, Homo Sapiens
gcggauggaggggccuggguugccagcucccu

SEQ ID NO: 421032 - RNA, 32 nt, Homo Sapiens
cgagcaaggcgggcggcauggugcuggugaaa

SEQ ID NO: 421033 - RNA, 32 nt, Homo Sapiens
uagauugcaaaauaaaauaguugaacucucug

SEQ ID NO: 421034 - RNA, 32 nt, Homo Sapiens
ccgagguugcaguccaugagcugggaaaggag

SEQ ID NO: 421035 - RNA, 32 nt, Homo Sapiens
aggcccuggcacccggcuccccggcccauguc

SEQ ID NO: 421036 - RNA, 31 nt, Homo Sapiens
uuauguucuauuuuaaaguccacucccccaa

SEQ ID NO: 421037 - RNA, 32 nt, Homo Sapiens
agaguugacaaggccuaugggaaaugccugau

SEQ ID NO: 421038 - RNA, 27 nt, Homo Sapiens
caacccuuggacuucagccuccagaac

SEQ ID NO: 421039 - RNA, 32 nt, Homo Sapiens
agcccgacugcagggagggaugcacccaucau

SEQ ID NO: 421040 - RNA, 32 nt, Homo Sapiens
gcuccuccgaggggcggccgggcagcgagcag

SEQ ID NO: 421041 - RNA, 30 nt, Homo Sapiens
gcccucaggggcgauuagcuuagugagcuu

SEQ ID NO: 421042 - RNA, 32 nt, Homo Sapiens
acucacaucccggcccagacacuuccugugug

SEQ ID NO: 421043 - RNA, 32 nt, Homo Sapiens
gccuggccaagcccccaagaggauggcagccu

SEQ ID NO: 421044 - RNA, 32 nt, Homo Sapiens
gcuuaagaaacacuugcguggacagccucuuu

SEQ ID NO: 421045 - RNA, 32 nt, Homo Sapiens
aguggugugggaaucagggaaaggcugccucu

SEQ ID NO: 421046 - RNA, 32 nt, Homo Sapiens
uccaauuuuuugcugaauaacaucuccuuucu

SEQ ID NO: 421047 - RNA, 32 nt, Homo Sapiens
ccccuagcaccgccggccggccccgagguccg

SEQ ID NO: 421048 - RNA, 32 nt, Homo Sapiens
caguggcugcaggcugcccccugccggccaca

SEQ ID NO: 421049 - RNA, 32 nt, Homo Sapiens
agcagcuugcgugggcugggccugcaguaccu

SEQ ID NO: 421050 - RNA, 32 nt, Homo Sapiens
gcuucucugucuuuuuucccccuaagucuuuc

SEQ ID NO: 421051 - RNA, 32 nt, Homo Sapiens
cccaccauaagagcuaaaggguccugggagau

SEQ ID NO: 421052 - RNA, 32 nt, Homo Sapiens
uacuaucaaauuauaguaacugagccugugug

SEQ ID NO: 421053 - RNA, 32 nt, Homo Sapiens
uguguccaagggugggacuaggcggcucugcc

SEQ ID NO: 421054 - RNA, 32 nt, Homo Sapiens
gacacuaccauugaaucagggaaugagaauua

SEQ ID NO: 421055 - RNA, 28 nt, Homo Sapiens
cuaaauaaacacauaaaauguuaugagu

SEQ ID NO: 421056 - RNA, 32 nt, Homo Sapiens
auuuuguuauuuaagagcuguuguuaagugga

SEQ ID NO: 421057 - RNA, 32 nt, Homo Sapiens
ucugcuuugacaaaguuagucuuuauuacuua

SEQ ID NO: 421058 - RNA, 28 nt, Homo Sapiens
cagacagggcuggucccgagguggaugc

SEQ ID NO: 421059 - RNA, 32 nt, Homo Sapiens
uguggccggggcggggccucaggggggcagag

SEQ ID NO: 421060 - RNA, 32 nt, Homo Sapiens
cugcacagcccucucagacccuucuuggccuc

SEQ ID NO: 421061 - RNA, 32 nt, Homo Sapiens
aaaaaauggaccuuaagaaacuauuuacucug

SEQ ID NO: 421062 - RNA, 32 nt, Homo Sapiens
uaauagcuuaaaguacaguaacacuuauuuug

SEQ ID NO: 421063 - RNA, 32 nt, Homo Sapiens
gaaucacucauguucagaaccuuguaaauaug

SEQ ID NO: 421064 - RNA, 32 nt, Homo Sapiens
uucacagacagacaauaagccagacaacacaa

SEQ ID NO: 421065 - RNA, 32 nt, Homo Sapiens
aucaguuaaguacacuugaaggaaguaaauga

SEQ ID NO: 421066 - RNA, 29 nt, Homo Sapiens
acaaugaaauaaaguuauuuucucauucc

SEQ ID NO: 421067 - RNA, 32 nt, Homo Sapiens
auacaaaagauauuuuuuaaacgguaaggauu

SEQ ID NO: 421068 - RNA, 32 nt, Homo Sapiens
guuggaaaauggugccaaauagacuugccuga

SEQ ID NO: 421069 - RNA, 32 nt, Homo Sapiens
gggacccgcaaagcggcgauggagcggagguc

SEQ ID NO: 421070 - RNA, 32 nt, Homo Sapiens
uccccugacgcccacacccaccaccaggcugu

SEQ ID NO: 421071 - RNA, 32 nt, Homo Sapiens
ucuaccaggaggagaccagguugcaguggcgu

SEQ ID NO: 421072 - RNA, 32 nt, Homo Sapiens
caccucccauaguuacagccacuacaucccca

SEQ ID NO: 421073 - RNA, 32 nt, Homo Sapiens
acuugaaugcuguuuacuugguacuaccuaau

SEQ ID NO: 421074 - RNA, 32 nt, Homo Sapiens
aaaaugcaaaauuuauaauagaguuacauuaa

SEQ ID NO: 421075 - RNA, 32 nt, Homo Sapiens
accaguuuuauugucaaauaaacuauaaaugu

SEQ ID NO: 421076 - RNA, 32 nt, Homo Sapiens
cugucacagcucagcuugaacucuguagccuc

SEQ ID NO: 421077 - RNA, 32 nt, Homo Sapiens
gauuauuuaaaauggaaaugugagaaucuggc

SEQ ID NO: 421078 - RNA, 32 nt, Homo Sapiens
gucaaagaacgaauuuguaucaaauagaucug

SEQ ID NO: 421079 - RNA, 30 nt, Homo Sapiens
auuggccuuugcagcggcggcagcagcacc

SEQ ID NO: 421080 - RNA, 32 nt, Homo Sapiens
gcugagcccguuagugcgcccggccgagacac

SEQ ID NO: 421081 - RNA, 32 nt, Homo Sapiens
guuagcuuggggaccugaacuguccuggaggc

SEQ ID NO: 421082 - RNA, 32 nt, Homo Sapiens
aaaauaccaauaugauguguacaggauaaugc

SEQ ID NO: 421083 - RNA, 32 nt, Homo Sapiens
uuagcuauaccuguagggaugacuuaagccua

SEQ ID NO: 421084 - RNA, 32 nt, Homo Sapiens
ggacucaguccugcuucuuuugccucgaguga

SEQ ID NO: 421085 - RNA, 32 nt, Homo Sapiens
gacggugccccugguuaaaggcagcaugagau

SEQ ID NO: 421086 - RNA, 32 nt, Homo Sapiens
caaggcuccauuuuuagcugcugcucugauuu

SEQ ID NO: 421087 - RNA, 32 nt, Homo Sapiens
gaggccuucccagcuggccgggcucacccugc

SEQ ID NO: 421088 - RNA, 32 nt, Homo Sapiens
ucuucagacaugaaagggaacauauauauucc

SEQ ID NO: 421089 - RNA, 32 nt, Homo Sapiens
uugggagaacuaaguaagaaacacaaugccaa

SEQ ID NO: 421090 - RNA, 32 nt, Homo Sapiens
cgugugcaggccgaaucagacccggcgugggc

SEQ ID NO: 421091 - RNA, 32 nt, Homo Sapiens
cucagcuuucccagcaccuacccaggcagaca

SEQ ID NO: 421092 - RNA, 32 nt, Homo Sapiens
gaacugaaugucucgguauaaaacacgauugu

SEQ ID NO: 421093 - RNA, 32 nt, Homo Sapiens
gaccccccuuccccggccccccuugcggcucc

SEQ ID NO: 421094 - RNA, 32 nt, Homo Sapiens
aaucagacccuaccccacccucaaugcuugua

SEQ ID NO: 421095 - RNA, 32 nt, Homo Sapiens
uucaaacaaaaauaacuuuagauauaucuuuu

SEQ ID NO: 421096 - RNA, 32 nt, Homo Sapiens
accaucagcgaguucauacuggagaaaggcau

SEQ ID NO: 421097 - RNA, 32 nt, Homo Sapiens
uuggaagucuauugcugggaagaaauuccauc

SEQ ID NO: 421098 - RNA, 32 nt, Homo Sapiens
aggaaugacggggacuccaucgaggacgugcu

SEQ ID NO: 421099 - RNA, 32 nt, Homo Sapiens
uuccggccagcagcuuccuccuucagccaccu

SEQ ID NO: 421100 - RNA, 31 nt, Homo Sapiens
uguaaaacaaagaaagauauacaugaccgaa

SEQ ID NO: 421101 - RNA, 32 nt, Homo Sapiens
ucuaccugccuugucccuguucugggggaagg

SEQ ID NO: 421102 - RNA, 32 nt, Homo Sapiens
agccaggccuggucggcgcccgcggagaaaag

SEQ ID NO: 421103 - RNA, 32 nt, Homo Sapiens
cugaggucuggaguuugagaccagccuggcca

SEQ ID NO: 421104 - RNA, 32 nt, Homo Sapiens
agcaugacagagggcaguguauggaggaaugg

SEQ ID NO: 421105 - RNA, 32 nt, Homo Sapiens
acugacagaaaagaaaccagggaguuuguaga

SEQ ID NO: 421106 - RNA, 32 nt, Homo Sapiens
uucuaguucauuuaaauaaccaguuaaaaucu

SEQ ID NO: 421107 - RNA, 32 nt, Homo Sapiens
gcuccucuguccugccucuacucccaccccca

SEQ ID NO: 421108 - RNA, 32 nt, Homo Sapiens
uugaggucaggaguuugagaccagacuggcca

SEQ ID NO: 421109 - RNA, 32 nt, Homo Sapiens
gcugcggaaugccccugcgccuggacacccag

SEQ ID NO: 421110 - RNA, 32 nt, Homo Sapiens
auuuuggaggauuccacaauuuuuguggccuu

SEQ ID NO: 421111 - RNA, 32 nt, Homo Sapiens
ggaccccagcugggguggaaaagcaguaccag

SEQ ID NO: 421112 - RNA, 32 nt, Homo Sapiens
aauggcacugaaacugaugauagggucauggu

SEQ ID NO: 421113 - RNA, 32 nt, Homo Sapiens
uucaacacacccaaaaucaagggccuggaugc

SEQ ID NO: 421114 - RNA, 32 nt, Homo Sapiens
cccuuaagggagggaagaggcuggggugaugg

SEQ ID NO: 421115 - RNA, 32 nt, Homo Sapiens
aaugccaggcccugcccccggcagaggcggaa

SEQ ID NO: 421116 - RNA, 32 nt, Homo Sapiens
ugaucagaugcugaauuuugugaaaugauuuu

SEQ ID NO: 421117 - RNA, 32 nt, Homo Sapiens
gaguguacgggcccgcgggccacggccaugca

SEQ ID NO: 421118 - RNA, 29 nt, Homo Sapiens
gcaagguggggacaggugggcgcggggcc

SEQ ID NO: 421119 - RNA, 32 nt, Homo Sapiens
uaaaauccaaaggaagauguuuacccucuuga

SEQ ID NO: 421120 - RNA, 32 nt, Homo Sapiens
agaaaguacugauuaucucccaaaugagaagu

SEQ ID NO: 421121 - RNA, 32 nt, Homo Sapiens
gcagaagacagaggguuuggagucuccucaac

SEQ ID NO: 421122 - RNA, 32 nt, Homo Sapiens
auaugaggcagacggaagauguggcagaaguc

SEQ ID NO: 421123 - RNA, 32 nt, Homo Sapiens
caggaauucaaguuuaacaugagcagcaacau

SEQ ID NO: 421124 - RNA, 32 nt, Homo Sapiens
cugcaugguuuauuuucccucuauccuuuuau

SEQ ID NO: 421125 - RNA, 32 nt, Homo Sapiens
aacccaaccuagcccagucccagccgccagcg

SEQ ID NO: 421126 - RNA, 32 nt, Homo Sapiens
uaauaaaugucuuuuagugguuugucaaaggc

SEQ ID NO: 421127 - RNA, 32 nt, Homo Sapiens
cuagaagaacagagauuuggcugguuuuucag

SEQ ID NO: 421128 - RNA, 32 nt, Homo Sapiens
agccuaccccccaccccaagcccuggcugcga

SEQ ID NO: 421129 - RNA, 32 nt, Homo Sapiens
uuuugcagggacccgggucugucugguuucug

SEQ ID NO: 421130 - RNA, 32 nt, Homo Sapiens
uuuacucccacuuuuuacguuugcaggugcca

SEQ ID NO: 421131 - RNA, 32 nt, Homo Sapiens
aaugcucugucucuggacccaggcugccugcu

SEQ ID NO: 421132 - RNA, 32 nt, Homo Sapiens
uaugcacagacauacacuaaacacgaacauac

SEQ ID NO: 421133 - RNA, 32 nt, Homo Sapiens
aucugagacuggguacuuuauaaagaaaagag

SEQ ID NO: 421134 - RNA, 32 nt, Homo Sapiens
gguugauugauauuauuuuuacauuguucugg

SEQ ID NO: 421135 - RNA, 32 nt, Homo Sapiens
aaagaaaaaaaauuauuugugggcaaauguua

SEQ ID NO: 421136 - RNA, 32 nt, Homo Sapiens
cagcggccucugcaggaucugcagcuguggaa

SEQ ID NO: 421137 - RNA, 32 nt, Homo Sapiens
cuccccuagucccccaggagcucuuuccuuuc

SEQ ID NO: 421138 - RNA, 32 nt, Homo Sapiens
ccaugccucccagcaaccagggcccgcgggug

SEQ ID NO: 421139 - RNA, 32 nt, Homo Sapiens
gagcaaaacucugucuaaaaauaaaaagaccu

SEQ ID NO: 421140 - RNA, 32 nt, Homo Sapiens
acuggugauguuccagaggagguacuacaaac

SEQ ID NO: 421141 - RNA, 32 nt, Homo Sapiens
uauuccucacagcuccucccgucuuuccgaga

SEQ ID NO: 421142 - RNA, 32 nt, Homo Sapiens
auguggcauaugcugccucgaauugggauuau

SEQ ID NO: 421143 - RNA, 30 nt, Homo Sapiens
aguggauguuugagacggaggcagaugaga

SEQ ID NO: 421144 - RNA, 30 nt, Homo Sapiens
aggacggucugugcccgagguuccugucaa

SEQ ID NO: 421145 - RNA, 32 nt, Homo Sapiens
gauauuaaaaauacauugugaagaauacugcu

SEQ ID NO: 421146 - RNA, 32 nt, Homo Sapiens
gggaaugcugaauaauuaauugauuuacagcc

SEQ ID NO: 421147 - RNA, 32 nt, Homo Sapiens
gaaugaaaguuccauauaugcauuggugaaua

SEQ ID NO: 421148 - RNA, 29 nt, Homo Sapiens
auauucuaugggcaauaccauuugguuuu

SEQ ID NO: 421149 - RNA, 32 nt, Homo Sapiens
ggugcccuuucugcuacaugcaaauggccucu

SEQ ID NO: 421150 - RNA, 32 nt, Homo Sapiens
ucguaauuguucucuaggaaaagagaacuuuu

SEQ ID NO: 421151 - RNA, 32 nt, Homo Sapiens
agaccuguuuuaaaaaggaacugcagcaaucu

SEQ ID NO: 421152 - RNA, 32 nt, Homo Sapiens
cugaugcuuccagccaggagaaguccuggaau

SEQ ID NO: 421153 - RNA, 32 nt, Homo Sapiens
uccuggcccccucccgcagcggcucggaaaaa

SEQ ID NO: 421154 - RNA, 32 nt, Homo Sapiens
ggcgaccgccccaccuccucccucccucccgc

SEQ ID NO: 421155 - RNA, 32 nt, Homo Sapiens
uggcacugaagguggaacaguugaaggcugag

SEQ ID NO: 421156 - RNA, 32 nt, Homo Sapiens
aggguuuccgcggagacgcgccgccggacccu

SEQ ID NO: 421157 - RNA, 31 nt, Homo Sapiens
cgcaccgagcgggcgccuucgagccagcgcc

SEQ ID NO: 421158 - RNA, 32 nt, Homo Sapiens
cccccuccugcuccggccccgccccugcugag

SEQ ID NO: 421159 - RNA, 32 nt, Homo Sapiens
gauuuuguauaauguaacaaacaucagacaaa

SEQ ID NO: 421160 - RNA, 32 nt, Homo Sapiens
ugaauuccgcagcagcagcaauuggguuggaa

SEQ ID NO: 421161 - RNA, 32 nt, Homo Sapiens
ucagaaauauuaacaaaaauucucagcauuaa

SEQ ID NO: 421162 - RNA, 32 nt, Homo Sapiens
aacaggcaaauuaagauuuuuacuucuggcug

SEQ ID NO: 421163 - RNA, 30 nt, Homo Sapiens
gugucagcgcccgugucaccgccacgucgc

SEQ ID NO: 421164 - RNA, 32 nt, Homo Sapiens
auuaggggccuucucaacaaaagcagcacacu

SEQ ID NO: 421165 - RNA, 32 nt, Homo Sapiens
gcccgaggggcucauaugcugcugcagaauga

SEQ ID NO: 421166 - RNA, 30 nt, Homo Sapiens
agagaggccaggcgcgguggcucacaccug

SEQ ID NO: 421167 - RNA, 32 nt, Homo Sapiens
gacaccacuaucccaccaaucacugagcacuu

SEQ ID NO: 421168 - RNA, 32 nt, Homo Sapiens
uguuuuucucuuguuguuuuuaucuuauuuuc

SEQ ID NO: 421169 - RNA, 32 nt, Homo Sapiens
gagugagcugggugggcccugcuagcgagaga

SEQ ID NO: 421170 - RNA, 32 nt, Homo Sapiens
uuaauaccaucccauagcuccugccaaaucga

SEQ ID NO: 421171 - RNA, 32 nt, Homo Sapiens
uucuaagacaccuccauuccaguuucugcaca

SEQ ID NO: 421172 - RNA, 32 nt, Homo Sapiens
ugauccaggcuaugagaauccaaacauucuuu

SEQ ID NO: 421173 - RNA, 32 nt, Homo Sapiens
gagccccggggaccccauggggugcuguaauc

SEQ ID NO: 421174 - RNA, 32 nt, Homo Sapiens
uuccugauguucaaguuugugaaacaggcuuu

SEQ ID NO: 421175 - RNA, 32 nt, Homo Sapiens
gagcuuucugucauccccauggcucaaggaua

SEQ ID NO: 421176 - RNA, 32 nt, Homo Sapiens
gugcuaagaggacagucuuucuccgggagccc

SEQ ID NO: 421177 - RNA, 32 nt, Homo Sapiens
cuuugucucuggcaucagcuggugagccaguc

SEQ ID NO: 421178 - RNA, 32 nt, Homo Sapiens
aacagcuguaaggguccaggucugcacaaggu

SEQ ID NO: 421179 - RNA, 32 nt, Homo Sapiens
ugugcauauacauaguacuuugaauaauguau

SEQ ID NO: 421180 - RNA, 32 nt, Homo Sapiens
auccauggcagcgggcccaaagggcaggcaac

SEQ ID NO: 421181 - RNA, 32 nt, Homo Sapiens
cuggaguagggagagcgaguuugggagcuggg

SEQ ID NO: 421182 - RNA, 32 nt, Homo Sapiens
cacagacucaggaagcugggggugucagggca

SEQ ID NO: 421183 - RNA, 32 nt, Homo Sapiens
gagcccaggcccagcccaucuggagccagaag

SEQ ID NO: 421184 - RNA, 32 nt, Homo Sapiens
cagaccugaaguuuggaaguucaacugccauc

SEQ ID NO: 421185 - RNA, 32 nt, Homo Sapiens
acgucagguaucuuuuaaaucgcgauaguuuu

SEQ ID NO: 421186 - RNA, 32 nt, Homo Sapiens
cugucggcgcugccccaucuccccucagcucg

SEQ ID NO: 421187 - RNA, 32 nt, Homo Sapiens
aaacuagcuuuccgcuaccggaaagugagaga

SEQ ID NO: 421188 - RNA, 32 nt, Homo Sapiens
gcugcgggucgcggccggcgccggccucucca

SEQ ID NO: 421189 - RNA, 32 nt, Homo Sapiens
uauguguguauuucauacacacacaaggaccu

SEQ ID NO: 421190 - RNA, 32 nt, Homo Sapiens
ccacauauuaaaccauguauaucuguggaaua

SEQ ID NO: 421191 - RNA, 32 nt, Homo Sapiens
gcccacccuuacucccucccccucaucuaccu

SEQ ID NO: 421192 - RNA, 32 nt, Homo Sapiens
cuucgaggguuggcagcacaccgggaggggau

SEQ ID NO: 421193 - RNA, 32 nt, Homo Sapiens
gugagcaaggccaggcacacuugugcuacugc

SEQ ID NO: 421194 - RNA, 32 nt, Homo Sapiens
gcggcggcgggggaaggaugcaggggaagaag

SEQ ID NO: 421195 - RNA, 32 nt, Homo Sapiens
cgugucccaucuacagaccugcagcuucauaa

SEQ ID NO: 421196 - RNA, 32 nt, Homo Sapiens
cgggugccucagagcaggcucagacucugggu

SEQ ID NO: 421197 - RNA, 29 nt, Homo Sapiens
cgucaugcccagcugugaccccgguccgg

SEQ ID NO: 421198 - RNA, 32 nt, Homo Sapiens
accucuguacucagcccucugucuguccuucu

SEQ ID NO: 421199 - RNA, 32 nt, Homo Sapiens
ucugaaaggauucacuuuugacuuuauaugac

SEQ ID NO: 421200 - RNA, 32 nt, Homo Sapiens
ccggguacucuaaguccucccucccccuucuc

SEQ ID NO: 421201 - RNA, 32 nt, Homo Sapiens
uguuagcaauaauuaaauauagcaaucagcaa

SEQ ID NO: 421202 - RNA, 32 nt, Homo Sapiens
uuuuaccuucacugcuggccuugcugcagaag

SEQ ID NO: 421203 - RNA, 32 nt, Homo Sapiens
gaaucuccuucccagacaccuucaaagucuua

SEQ ID NO: 421204 - RNA, 32 nt, Homo Sapiens
cacauauauauacacacacacacacacacaca

SEQ ID NO: 421205 - RNA, 32 nt, Homo Sapiens
uauauauacacacacacacacacacacacaca

SEQ ID NO: 421206 - RNA, 32 nt, Homo Sapiens
uuuucuuuuucuuuuucuuuuucuuuuuuuuu

SEQ ID NO: 421207 - RNA, 32 nt, Homo Sapiens
uucuuucuuucuuuuucuuucucuuucuuucu

SEQ ID NO: 421208 - RNA, 31 nt, Homo Sapiens
acugagucacacugccugcuccuuugggugu

SEQ ID NO: 421209 - RNA, 32 nt, Homo Sapiens
augaugcuguuaccaaaaacauuaagguaguu

SEQ ID NO: 421210 - RNA, 32 nt, Homo Sapiens
ugcgcucgcgguucucucgcggaggucggcgg

SEQ ID NO: 421211 - RNA, 32 nt, Homo Sapiens
caugauuaagggucucuauggaauaaaggaug

SEQ ID NO: 421212 - RNA, 32 nt, Homo Sapiens
auauacaccagucaguaacauaacacaaagga

SEQ ID NO: 421213 - RNA, 32 nt, Homo Sapiens
augauuaguuaugucuuuuaauaaaaaggaaa

SEQ ID NO: 421214 - RNA, 31 nt, Homo Sapiens
ugggagagggcggagggggaggcggcgcgcg

SEQ ID NO: 421215 - RNA, 32 nt, Homo Sapiens
cccucucccuccccagcccugaaggccaagaa

SEQ ID NO: 421216 - RNA, 32 nt, Homo Sapiens
aggacugguuccucagaaagcacccucaggga

SEQ ID NO: 421217 - RNA, 32 nt, Homo Sapiens
uauguauuuauuuaagcaucaaauauuugugc

SEQ ID NO: 421218 - RNA, 32 nt, Homo Sapiens
cacauggaccucugggaagacgucuggcgaga

SEQ ID NO: 421219 - RNA, 32 nt, Homo Sapiens
gccauguauggacugaggaaaccucacugugu

SEQ ID NO: 421220 - RNA, 32 nt, Homo Sapiens
uuauguugcugucgcuccuguuuuuaaccaua

SEQ ID NO: 421221 - RNA, 32 nt, Homo Sapiens
ucuuuucuuucuuuuucuuucuuuucuuuuuu

SEQ ID NO: 421222 - RNA, 32 nt, Homo Sapiens
agugaagaaagugaucucaagagguccaggga

SEQ ID NO: 421223 - RNA, 32 nt, Homo Sapiens
uauacuaucucaccaguauuugcucucgacuc

SEQ ID NO: 421224 - RNA, 32 nt, Homo Sapiens
aucaugaaaaggaggaagcucaaacugaagug

SEQ ID NO: 421225 - RNA, 32 nt, Homo Sapiens
auuucagcaaaccaccaccucccacucagugu

SEQ ID NO: 421226 - RNA, 31 nt, Homo Sapiens
aagaagcugacuaagaaccagccaaagccuu

SEQ ID NO: 421227 - RNA, 32 nt, Homo Sapiens
agcacagcccuccugucuccuguguugggucc

SEQ ID NO: 421228 - RNA, 32 nt, Homo Sapiens
gugauuauauuuuugggggcuuuccuuuuauu

SEQ ID NO: 421229 - RNA, 32 nt, Homo Sapiens
accguccccccgccccgcgccgccucccaucu

SEQ ID NO: 421230 - RNA, 32 nt, Homo Sapiens
uuauguggaaaacccucacuuucucuucacgg

SEQ ID NO: 421231 - RNA, 32 nt, Homo Sapiens
cuucuauguccugagcaugaucuacaaacaug

SEQ ID NO: 421232 - RNA, 32 nt, Homo Sapiens
gaaaagaugaccccacgaucccauggccuguu

SEQ ID NO: 421233 - RNA, 32 nt, Homo Sapiens
gucagguauugugcuaaguauuaggguacaau

SEQ ID NO: 421234 - RNA, 32 nt, Homo Sapiens
ggcaauuuacaaaagaaauguuuaauuggacu

SEQ ID NO: 421235 - RNA, 32 nt, Homo Sapiens
cacccccgcccccucccugcaccuccuguccu

SEQ ID NO: 421236 - RNA, 32 nt, Homo Sapiens
cuuuaaucuuucuugguccacauccugaaagc

SEQ ID NO: 421237 - RNA, 32 nt, Homo Sapiens
cacaccauuguagaagaaaaacaacagaagga

SEQ ID NO: 421238 - RNA, 32 nt, Homo Sapiens
agcgccccucagagauucugaugccacugaag

SEQ ID NO: 421239 - RNA, 32 nt, Homo Sapiens
auaaagguaaaacuugucuccaaccaguuuca

SEQ ID NO: 421240 - RNA, 32 nt, Homo Sapiens
cgucaaugugaacaccucucuuugugcugaau

SEQ ID NO: 421241 - RNA, 32 nt, Homo Sapiens
cucugacagagguaacuggauuagggacgagu

SEQ ID NO: 421242 - RNA, 32 nt, Homo Sapiens
aaaggauuggcgaguuaucuuugaaacuguuu

SEQ ID NO: 421243 - RNA, 32 nt, Homo Sapiens
gcggaaccuuaggccuggcccuggucuccgag

SEQ ID NO: 421244 - RNA, 32 nt, Homo Sapiens
accguguacagcuugauaacccuuaauaaaaa

SEQ ID NO: 421245 - RNA, 32 nt, Homo Sapiens
caccacccucugcuccuccuucuccuguccug

SEQ ID NO: 421246 - RNA, 32 nt, Homo Sapiens
acacugcaaauaugaaggaccacaaaaggcac

SEQ ID NO: 421247 - RNA, 32 nt, Homo Sapiens
gacucagccugccugcaccuaggugauuaaaa

SEQ ID NO: 421248 - RNA, 32 nt, Homo Sapiens
gcugugagacaagagggacaaguggggacugc

SEQ ID NO: 421249 - RNA, 32 nt, Homo Sapiens
acagcaacaaagucacauaaaucuuucccuga

SEQ ID NO: 421250 - RNA, 32 nt, Homo Sapiens
ugaauguguaaaugcuaugaaaauaguuacua

SEQ ID NO: 421251 - RNA, 32 nt, Homo Sapiens
ugcacaaagcuacucuccacuccugcacacug

SEQ ID NO: 421252 - RNA, 32 nt, Homo Sapiens
guaaagcccaccuguuuggaugggaguagagg

SEQ ID NO: 421253 - RNA, 32 nt, Homo Sapiens
uuugcagucaaaugguuuuucuugcuguaagu

SEQ ID NO: 421254 - RNA, 32 nt, Homo Sapiens
cagauaccaauuuuugcaaauuagauuuaauc

SEQ ID NO: 421255 - RNA, 32 nt, Homo Sapiens
ugccugccuuccacaaucauggcguauauagu

SEQ ID NO: 421256 - RNA, 32 nt, Homo Sapiens
caacacaaauucaaaucauuauacguguagcc

SEQ ID NO: 421257 - RNA, 32 nt, Homo Sapiens
ccucuaauucuguaggacuuugaauaauguga

SEQ ID NO: 421258 - RNA, 32 nt, Homo Sapiens
uugaauauuauggaugagucuuugaaaaggca

SEQ ID NO: 421259 - RNA, 32 nt, Homo Sapiens
uaagguaggugccucuuccaucuuuugccacu

SEQ ID NO: 421260 - RNA, 29 nt, Homo Sapiens
ucuuaauaaaguuuuaagcuuuucuccaa

SEQ ID NO: 421261 - RNA, 32 nt, Homo Sapiens
ccuacagcuuggggccugggcuccucugacca

SEQ ID NO: 421262 - RNA, 32 nt, Homo Sapiens
uuccccccacucuucuggggucggggguuccu

SEQ ID NO: 421263 - RNA, 32 nt, Homo Sapiens
uuauaaauuggugaaaaaugcaauguccaagc

SEQ ID NO: 421264 - RNA, 32 nt, Homo Sapiens
ugggccggcgcgcgcgacucccggcagcucag

SEQ ID NO: 421265 - RNA, 32 nt, Homo Sapiens
uguuaucuuugacauguaacauccuuuuuaga

SEQ ID NO: 421266 - RNA, 32 nt, Homo Sapiens
ucuucagcucuuuguagguucugggcuggguu

SEQ ID NO: 421267 - RNA, 32 nt, Homo Sapiens
ccuagaccggcacuuaaagccuggcugucacc

SEQ ID NO: 421268 - RNA, 32 nt, Homo Sapiens
uggccgugguggcacaugcccguaaucccagc

SEQ ID NO: 421269 - RNA, 32 nt, Homo Sapiens
cacagaucccacuucugauaccaucuauuaaa

SEQ ID NO: 421270 - RNA, 32 nt, Homo Sapiens
cccuccccugccugcauucccgggacggaccc

SEQ ID NO: 421271 - RNA, 32 nt, Homo Sapiens
uggcccacaacacugaguuaguggacaccggc

SEQ ID NO: 421272 - RNA, 32 nt, Homo Sapiens
cuuaaucuucuuccuuguugcuuucaaguagu

SEQ ID NO: 421273 - RNA, 32 nt, Homo Sapiens
gcgcugaugccgcagggcgcgccgcggagcgc

SEQ ID NO: 421274 - RNA, 32 nt, Homo Sapiens
ccgggcggugcccuccaugcccgggggaugaa

SEQ ID NO: 421275 - RNA, 32 nt, Homo Sapiens
ccaguuuuucuuuacuuucucccaguauguuu

SEQ ID NO: 421276 - RNA, 29 nt, Homo Sapiens
uaugaugucaauuagugaaaguauugaaa

SEQ ID NO: 421277 - RNA, 32 nt, Homo Sapiens
cacgcccggcccagcccugccggccgcauugg

SEQ ID NO: 421278 - RNA, 32 nt, Homo Sapiens
agaugaaguauuuaacuaugaauaucaugaag

SEQ ID NO: 421279 - RNA, 32 nt, Homo Sapiens
gaagauacugaauacuaaucauggcauguaua

SEQ ID NO: 421280 - RNA, 32 nt, Homo Sapiens
ccugcagaacagagggucaucugcuuucauua

SEQ ID NO: 421281 - RNA, 32 nt, Homo Sapiens
gugucucccccucccuccaagagguccugcuc

SEQ ID NO: 421282 - RNA, 32 nt, Homo Sapiens
ugaaauuugugauuuguuuaaacucuggguga

SEQ ID NO: 421283 - RNA, 32 nt, Homo Sapiens
auacauuuuuaaacugucaguaauuauuguca

SEQ ID NO: 421284 - RNA, 32 nt, Homo Sapiens
gagaauuuuagugcuuuuuuuuuccuaaaaua

SEQ ID NO: 421285 - RNA, 32 nt, Homo Sapiens
gacauucauuggccaucaggauauaccaggag

SEQ ID NO: 421286 - RNA, 32 nt, Homo Sapiens
aaacaaaaaaaaccucuuugcugguauauuug

SEQ ID NO: 421287 - RNA, 32 nt, Homo Sapiens
ugcuccacagaaacuuaaggcugaaagagugu

SEQ ID NO: 421288 - RNA, 32 nt, Homo Sapiens
uaacuguucccuuugcccuucaaacugcagau

SEQ ID NO: 421289 - RNA, 32 nt, Homo Sapiens
uacuuuaguucaucagaaaacuucagcacaug

SEQ ID NO: 421290 - RNA, 32 nt, Homo Sapiens
caagcuuagcaagccuaaguccccucauguuc

SEQ ID NO: 421291 - RNA, 32 nt, Homo Sapiens
auagaauacuuaauaaugcuuuuccgcaaccg

SEQ ID NO: 421292 - RNA, 32 nt, Homo Sapiens
cauuucucauuucaaagugcucauaaaauugu

SEQ ID NO: 421293 - RNA, 32 nt, Homo Sapiens
guccauagacauuuguaucugaauccacaaga

SEQ ID NO: 421294 - RNA, 32 nt, Homo Sapiens
uguguagauugugaaaucucuucuugcaagaa

SEQ ID NO: 421295 - RNA, 32 nt, Homo Sapiens
cccgggguccccagccccgcccccaucggacg

SEQ ID NO: 421296 - RNA, 32 nt, Homo Sapiens
uacagaacauuuuugcagaaauuauguuugaa

SEQ ID NO: 421297 - RNA, 32 nt, Homo Sapiens
gaagacuugguugugcagaaacugaguucuua

SEQ ID NO: 421298 - RNA, 32 nt, Homo Sapiens
gggcccgugcgcgccccgcaggcagacguggc

SEQ ID NO: 421299 - RNA, 32 nt, Homo Sapiens
uuugucuuucuuuuuuauuuuuuaaguauugg

SEQ ID NO: 421300 - RNA, 32 nt, Homo Sapiens
gugcugaaugacucaaggauuuuuugggcaac

SEQ ID NO: 421301 - RNA, 32 nt, Homo Sapiens
acccaucuaucuaucaucuguguauaaucuac

SEQ ID NO: 421302 - RNA, 32 nt, Homo Sapiens
gcgccgcaggccuggguucccggacagcugag

SEQ ID NO: 421303 - RNA, 32 nt, Homo Sapiens
ugaagaugaugaaugggaugacugguggcuga

SEQ ID NO: 421304 - RNA, 32 nt, Homo Sapiens
ggguauuuaaacaauaaaugugcaguuuuaac

SEQ ID NO: 421305 - RNA, 32 nt, Homo Sapiens
ggaacacauuugacuuuuuuuucucauauuuu

SEQ ID NO: 421306 - RNA, 32 nt, Homo Sapiens
cccgcccgugccccgcucgcucucgggagaug

SEQ ID NO: 421307 - RNA, 32 nt, Homo Sapiens
caacggaaauccauccacaaaggaugcagugc

SEQ ID NO: 421308 - RNA, 32 nt, Homo Sapiens
ugcucuuccccgcggcucgugcucuccaggag

SEQ ID NO: 421309 - RNA, 32 nt, Homo Sapiens
cgcuaacuccguuucuccuuggaccaagauga

SEQ ID NO: 421310 - RNA, 32 nt, Homo Sapiens
cagcgcccgggcgcgccgcgccauugccugca

SEQ ID NO: 421311 - RNA, 32 nt, Homo Sapiens
auuuuccccagcuggccgcauuccucucugcu

SEQ ID NO: 421312 - RNA, 32 nt, Homo Sapiens
uugcugggcuccuggguuggacucccucucug

SEQ ID NO: 421313 - RNA, 32 nt, Homo Sapiens
auugauccaucccaucucuucauuuugaggga

SEQ ID NO: 421314 - RNA, 32 nt, Homo Sapiens
ucuccuaaaaauacagaaaauuagccuggcau

SEQ ID NO: 421315 - RNA, 32 nt, Homo Sapiens
gugaggcuuccacuucacucuccgguccaaga

SEQ ID NO: 421316 - RNA, 32 nt, Homo Sapiens
cgccuuuuucccuuuucuaagcuuucuguguu

SEQ ID NO: 421317 - RNA, 32 nt, Homo Sapiens
ugaaggagucagaaugccuuaauacaaacucg

SEQ ID NO: 421318 - RNA, 32 nt, Homo Sapiens
uuauuugggagucuuugugaccagagaaguua

SEQ ID NO: 421319 - RNA, 32 nt, Homo Sapiens
gaagacaaaaauuuuacaguuuaagacuuaaa

SEQ ID NO: 421320 - RNA, 32 nt, Homo Sapiens
caaaaugaguaauugaaugagaugaagaaaua

SEQ ID NO: 421321 - RNA, 32 nt, Homo Sapiens
gcacccuagaccagaagcugcgucuggucacu

SEQ ID NO: 421322 - RNA, 32 nt, Homo Sapiens
guaauuggauuuucuuaauauucauuaaaaac

SEQ ID NO: 421323 - RNA, 32 nt, Homo Sapiens
uuccauuccuuccacacccagcuaaaguuaga

SEQ ID NO: 421324 - RNA, 32 nt, Homo Sapiens
acaagaagcacaagucggacaaacaccuccac

SEQ ID NO: 421325 - RNA, 32 nt, Homo Sapiens
auauuuuaaugcacguugcauuaaaccucacu

SEQ ID NO: 421326 - RNA, 32 nt, Homo Sapiens
ucuacacagacauggacaauuuagacaguauu

SEQ ID NO: 421327 - RNA, 32 nt, Homo Sapiens
auuaaguaaucuuuuuacaguugcaucaggcc

SEQ ID NO: 421328 - RNA, 32 nt, Homo Sapiens
aaaaguaagaguuccucagaucagagcucagu

SEQ ID NO: 421329 - RNA, 28 nt, Homo Sapiens
ggggcaggcucaggaccaagucccucuc

SEQ ID NO: 421330 - RNA, 32 nt, Homo Sapiens
acucauccugaacagcauggcacuggguccag

SEQ ID NO: 421331 - RNA, 32 nt, Homo Sapiens
gaccagugugcuauauaguuaaagcucauucc

SEQ ID NO: 421332 - RNA, 32 nt, Homo Sapiens
aggccuuccuucccuagcugugucuuggucuu

SEQ ID NO: 421333 - RNA, 32 nt, Homo Sapiens
cugcugcccaagugcuggggucggggagagcc

SEQ ID NO: 421334 - RNA, 32 nt, Homo Sapiens
ccaaaagucugcuuaauuucaaaagaaaaaug

SEQ ID NO: 421335 - RNA, 32 nt, Homo Sapiens
uccauagggagcuggcuggggguuuccguggg

SEQ ID NO: 421336 - RNA, 32 nt, Homo Sapiens
cacuuccuggaguuaaauuuuccaacagccau

SEQ ID NO: 421337 - RNA, 32 nt, Homo Sapiens
gugauuccaaauaauucuuuuguuucuaauca

SEQ ID NO: 421338 - RNA, 32 nt, Homo Sapiens
aagguuauuguagaaucagaucuagcuuacuu

SEQ ID NO: 421339 - RNA, 32 nt, Homo Sapiens
ccugugcauccgcacgcggagccgucuguuag

SEQ ID NO: 421340 - RNA, 32 nt, Homo Sapiens
aguuucacaaucuguugucuccagcucugcau

SEQ ID NO: 421341 - RNA, 32 nt, Homo Sapiens
ccugugggcagagggacaggucagacacccag

SEQ ID NO: 421342 - RNA, 32 nt, Homo Sapiens
uuccagaccaauauuucuuccugcgguuuauu

SEQ ID NO: 421343 - RNA, 32 nt, Homo Sapiens
ugguaaauuacuucuuuuuuuucuuuuuaaua

SEQ ID NO: 421344 - RNA, 32 nt, Homo Sapiens
cucaggaaaacgggaccggccaggccaccucc

SEQ ID NO: 421345 - RNA, 32 nt, Homo Sapiens
uuuccagcugaaugaaugcacuuagcugauaa

SEQ ID NO: 421346 - RNA, 32 nt, Homo Sapiens
ccaauuccacauaagcacuuuuggaagaaaac

SEQ ID NO: 421347 - RNA, 32 nt, Homo Sapiens
cuaaagucaggaguucgagaccagccugacca

SEQ ID NO: 421348 - RNA, 32 nt, Homo Sapiens
ccuaggccaggguggggccgccgcagaugggc

SEQ ID NO: 421349 - RNA, 32 nt, Homo Sapiens
cucacugaauaguuuuaaaugacugaguggua

SEQ ID NO: 421350 - RNA, 32 nt, Homo Sapiens
cuaagguuaggaguuugagaccagccuggcca

SEQ ID NO: 421351 - RNA, 32 nt, Homo Sapiens
gguggagcuggcguccgcgggugcuggucugg

SEQ ID NO: 421352 - RNA, 32 nt, Homo Sapiens
aacuuucuuaccauuaacauuuuuuuacccuu

SEQ ID NO: 421353 - RNA, 32 nt, Homo Sapiens
cuuucgaauaaauguguaacuuugaaauugug

SEQ ID NO: 421354 - RNA, 32 nt, Homo Sapiens
ccgggcccggugccgaggacuggccgccaagg

SEQ ID NO: 421355 - RNA, 32 nt, Homo Sapiens
auauuggagaauuggcagcuguugagcuucuu

SEQ ID NO: 421356 - RNA, 32 nt, Homo Sapiens
ucguggccagagggccagcccgcgggcguacc

SEQ ID NO: 421357 - RNA, 32 nt, Homo Sapiens
ccccaaagucaagcaagagacuaguugaaggg

SEQ ID NO: 421358 - RNA, 32 nt, Homo Sapiens
ggauauuccuucccugguccaagcuccuaucu

SEQ ID NO: 421359 - RNA, 32 nt, Homo Sapiens
ggagugagaaacagaagaagugguauuugcug

SEQ ID NO: 421360 - RNA, 32 nt, Homo Sapiens
cgagcgggaccgagaagugggcugggagcaga

SEQ ID NO: 421361 - RNA, 32 nt, Homo Sapiens
augaggcccuccccauggcuuuagggggauua

SEQ ID NO: 421362 - RNA, 31 nt, Homo Sapiens
cgcuccaagcccagccugccccgcugccgcc

SEQ ID NO: 421363 - RNA, 32 nt, Homo Sapiens
uuggaagaacagaaccccuaggaacccugcug

SEQ ID NO: 421364 - RNA, 32 nt, Homo Sapiens
aaaaugaaacgugcucuccagguuacauauaa

SEQ ID NO: 421365 - RNA, 32 nt, Homo Sapiens
gcugagucaucgcauuccuuaauagugucuuc

SEQ ID NO: 421366 - RNA, 32 nt, Homo Sapiens
accgcaugagccauaccccagugacacaggcu

SEQ ID NO: 421367 - RNA, 32 nt, Homo Sapiens
uggaugcuuccugucccuggaacucuuccagc

SEQ ID NO: 421368 - RNA, 32 nt, Homo Sapiens
cuaaggucaggaguucgagaccagccuggcca

SEQ ID NO: 421369 - RNA, 32 nt, Homo Sapiens
cccugccggaccucagccccagcccgcucccc

SEQ ID NO: 421370 - RNA, 32 nt, Homo Sapiens
augaauguaaacaauuaaauguuuauagcagc

SEQ ID NO: 421371 - RNA, 32 nt, Homo Sapiens
cccucacccuccccgcgcuuuccauuuuacuu

SEQ ID NO: 421372 - RNA, 32 nt, Homo Sapiens
ucaacucugcaaacaacagaagacgguucaug

SEQ ID NO: 421373 - RNA, 32 nt, Homo Sapiens
cugaguugauaaagggaaaaauuguaaggcag

SEQ ID NO: 421374 - RNA, 32 nt, Homo Sapiens
aaugucaaaaauacauuuuacuuuauucaaag

SEQ ID NO: 421375 - RNA, 32 nt, Homo Sapiens
ucccaccuuacuaaauuaccagcaaaacaaac

SEQ ID NO: 421376 - RNA, 32 nt, Homo Sapiens
cauucacaauacuggcacuauaaagaacaaaa

SEQ ID NO: 421377 - RNA, 32 nt, Homo Sapiens
acuggguaccucagggugagcagagggcacug

SEQ ID NO: 421378 - RNA, 32 nt, Homo Sapiens
ucuuaccaaagucuuguuaggugguuuauagu

SEQ ID NO: 421379 - RNA, 32 nt, Homo Sapiens
ucaccugaaacacuggaccuggggguagcccc

SEQ ID NO: 421380 - RNA, 31 nt, Homo Sapiens
accugcaccgcccagaaccuggcgggugagg

SEQ ID NO: 421381 - RNA, 32 nt, Homo Sapiens
gggcaucuaaaucugcagcaaccaucagcucu

SEQ ID NO: 421382 - RNA, 32 nt, Homo Sapiens
gggagacacacacagccucucugcccaccucu

SEQ ID NO: 421383 - RNA, 32 nt, Homo Sapiens
gugagcaaguucuauuuguucauugcuugcca

SEQ ID NO: 421384 - RNA, 32 nt, Homo Sapiens
gaauuagagaaaagggaaagaccuuuucuucu

SEQ ID NO: 421385 - RNA, 32 nt, Homo Sapiens
acuuuuguaaaaauuaaauuuggaauuacuug

SEQ ID NO: 421386 - RNA, 32 nt, Homo Sapiens
aaccaucuucccuccuguucuccauggcuauu

SEQ ID NO: 421387 - RNA, 29 nt, Homo Sapiens
ccuuacauuuguauguaugucaugagugg

SEQ ID NO: 421388 - RNA, 32 nt, Homo Sapiens
agugcugguccgugcugaugucuucagauacc

SEQ ID NO: 421389 - RNA, 32 nt, Homo Sapiens
gcgcagggccccagacagcuucccagcaggcc

SEQ ID NO: 421390 - RNA, 32 nt, Homo Sapiens
ucugggcuuauauguacuuuuacuuuuuggug

SEQ ID NO: 421391 - RNA, 32 nt, Homo Sapiens
ucauucccaagcccuaucugagugguuccaaa

SEQ ID NO: 421392 - RNA, 32 nt, Homo Sapiens
gaauuuauuccuucuuguggguucucggucuc

SEQ ID NO: 421393 - RNA, 32 nt, Homo Sapiens
guaaugagcuuguuucuugucuauuuugucug

SEQ ID NO: 421394 - RNA, 32 nt, Homo Sapiens
uaccuugugcuuagcuuucagauuauggauga

SEQ ID NO: 421395 - RNA, 32 nt, Homo Sapiens
ugcuaguaauuuccucguaaugauucuguuau

SEQ ID NO: 421396 - RNA, 32 nt, Homo Sapiens
ccccguggacagagccagagggcaguggcgcu

SEQ ID NO: 421397 - RNA, 32 nt, Homo Sapiens
uguacgggaggauaaucgcaacaucaucaacc

SEQ ID NO: 421398 - RNA, 32 nt, Homo Sapiens
cucucggaccucgggcgccgggccgcgcgcug

SEQ ID NO: 421399 - RNA, 32 nt, Homo Sapiens
ggaaaggaaacaaaaaagugaaggaaauauuu

SEQ ID NO: 421400 - RNA, 32 nt, Homo Sapiens
gaacaacaguuuaaguuuuuuuuuuuuuuuuu

SEQ ID NO: 421401 - RNA, 31 nt, Homo Sapiens
cucccaccccucacagcucaagccaagucca

SEQ ID NO: 421402 - RNA, 30 nt, Homo Sapiens
gaugaggccaggcgcgguggcucacgccug

SEQ ID NO: 421403 - RNA, 32 nt, Homo Sapiens
uuaagguucugcagggcaaggcugucugggac

SEQ ID NO: 421404 - RNA, 32 nt, Homo Sapiens
uacugguugcauauuucuuauccaaaaugcuu

SEQ ID NO: 421405 - RNA, 32 nt, Homo Sapiens
cccgcuagccuucaacccuuuccuccugucca

SEQ ID NO: 421406 - RNA, 32 nt, Homo Sapiens
gcgcggcucggagaggcggcggcagcggcgga

SEQ ID NO: 421407 - RNA, 32 nt, Homo Sapiens
ggagugcagugguaugaucucaccuuacugca

SEQ ID NO: 421408 - RNA, 32 nt, Homo Sapiens
gcugcccgugugccuggcagguggagcugccc

SEQ ID NO: 421409 - RNA, 32 nt, Homo Sapiens
gaaaagcaaaacaaaaacaauucaggaacaac

SEQ ID NO: 421410 - RNA, 32 nt, Homo Sapiens
gacagggucuuucucugucacccaggauggag

SEQ ID NO: 421411 - RNA, 32 nt, Homo Sapiens
agcaaccagguacguaggucggcggcccagcu

SEQ ID NO: 421412 - RNA, 32 nt, Homo Sapiens
uuuguacaaaaauagcaauuaauuuguaaaca

SEQ ID NO: 421413 - RNA, 32 nt, Homo Sapiens
auacacuugacugucuuugugauaagugacau

SEQ ID NO: 421414 - RNA, 32 nt, Homo Sapiens
gacacgcacugcauucggcagagcuccaguga

SEQ ID NO: 421415 - RNA, 27 nt, Homo Sapiens
ggaugucggacacguggagcucuaucc

SEQ ID NO: 421416 - RNA, 32 nt, Homo Sapiens
gaauguguccauaugugucuguaagagagaca

SEQ ID NO: 421417 - RNA, 32 nt, Homo Sapiens
agcuggcuaaucccaaggcagugugcucagcu

SEQ ID NO: 421418 - RNA, 32 nt, Homo Sapiens
auucaggcugccuggaggaaggacggggcuga

SEQ ID NO: 421419 - RNA, 32 nt, Homo Sapiens
agaagucuugggauuggauuuuaccauaugaa

SEQ ID NO: 421420 - RNA, 32 nt, Homo Sapiens
uugagugccuacuguguguugggugccauucc

SEQ ID NO: 421421 - RNA, 32 nt, Homo Sapiens
cacgagccaacaccccaccccucugccaaccg

SEQ ID NO: 421422 - RNA, 32 nt, Homo Sapiens
uagaaguguguggugggucucuuccaaauacu

SEQ ID NO: 421423 - RNA, 32 nt, Homo Sapiens
gagaaagacaccuggucaggaauguggaccac

SEQ ID NO: 421424 - RNA, 32 nt, Homo Sapiens
uucggugccaacauuuuuuagagcuguaccaa

SEQ ID NO: 421425 - RNA, 32 nt, Homo Sapiens
ucagacuucucuaucaacucuuggcauagcac

SEQ ID NO: 421426 - RNA, 32 nt, Homo Sapiens
gugggaaaauagagguaggaaauaguagccua

SEQ ID NO: 421427 - RNA, 32 nt, Homo Sapiens
ggcuucugggagaggagugagaacgugcaggg

SEQ ID NO: 421428 - RNA, 32 nt, Homo Sapiens
cguaucccgcguccccgccgcgcuggauccgg

SEQ ID NO: 421429 - RNA, 32 nt, Homo Sapiens
auacauacaaauaaagauacauguguauaauu

SEQ ID NO: 421430 - RNA, 32 nt, Homo Sapiens
guauguugguagcugagaaaaauaucaucagu

SEQ ID NO: 421431 - RNA, 32 nt, Homo Sapiens
ggcacgagggugguuccggguaggagcuaggu

SEQ ID NO: 421432 - RNA, 32 nt, Homo Sapiens
gcauauugauaugaauuauauaaaauuguuua

SEQ ID NO: 421433 - RNA, 32 nt, Homo Sapiens
acauacagccuuggaacaaaaugagagaaaca

SEQ ID NO: 421434 - RNA, 32 nt, Homo Sapiens
ucuuaaaagggaacaaaauauaccauaggcua

SEQ ID NO: 421435 - RNA, 32 nt, Homo Sapiens
cacccugcaauccacaccccauccucugcugc

SEQ ID NO: 421436 - RNA, 32 nt, Homo Sapiens
cuccuggugguuaauaugguguaaccaaagaa

SEQ ID NO: 421437 - RNA, 32 nt, Homo Sapiens
agugggccagguaagcccuagagccuugaacc

SEQ ID NO: 421438 - RNA, 32 nt, Homo Sapiens
cuccaaccacccccgcuucucaucaccaggac

SEQ ID NO: 421439 - RNA, 32 nt, Homo Sapiens
ggacccugagccugugugugucgggcagcugc

SEQ ID NO: 421440 - RNA, 32 nt, Homo Sapiens
cugagucucggaaacuaagauuuuagaugaag

SEQ ID NO: 421441 - RNA, 32 nt, Homo Sapiens
augaugcaggaacaggaagagaagauguggga

SEQ ID NO: 421442 - RNA, 32 nt, Homo Sapiens
gcaaaagaacaggagcagcauaggcuguuuga

SEQ ID NO: 421443 - RNA, 32 nt, Homo Sapiens
aaguaaccacgaucguuaugcugaguauguua

SEQ ID NO: 421444 - RNA, 28 nt, Homo Sapiens
gaaucauggcggccgccaagguggcuuu

SEQ ID NO: 421445 - RNA, 32 nt, Homo Sapiens
uccucucauccgggcugccccgcggcccccaa

SEQ ID NO: 421446 - RNA, 32 nt, Homo Sapiens
cccccauccucacacccacucaucucugagga

SEQ ID NO: 421447 - RNA, 32 nt, Homo Sapiens
acugacagccaagcugcagcugcagacucggc

SEQ ID NO: 421448 - RNA, 32 nt, Homo Sapiens
gccauucugaagauaauaaaaugaauguguug

SEQ ID NO: 421449 - RNA, 32 nt, Homo Sapiens
ggaugaggaugaugaccuguggaaugaagcug

SEQ ID NO: 421450 - RNA, 32 nt, Homo Sapiens
gcgcagacugucagagucauuaagcgggaucc

SEQ ID NO: 421451 - RNA, 32 nt, Homo Sapiens
uuuacuguuugugaaaguaugaaacagauuug

SEQ ID NO: 421452 - RNA, 32 nt, Homo Sapiens
cucccucucccucuccuggggcauuugagucu

SEQ ID NO: 421453 - RNA, 32 nt, Homo Sapiens
uuuguuccaacaguggccuucuccgggcuuca

SEQ ID NO: 421454 - RNA, 32 nt, Homo Sapiens
gggugagaggauggaauugugugcacaagaac

SEQ ID NO: 421455 - RNA, 32 nt, Homo Sapiens
uucuucauuauguuuucugacauaucugaaaa

SEQ ID NO: 421456 - RNA, 32 nt, Homo Sapiens
gaauuccgcggcgccgggacagccccgggacu

SEQ ID NO: 421457 - RNA, 32 nt, Homo Sapiens
uagaggauuuaccaagcaaaugucugaauuau

SEQ ID NO: 421458 - RNA, 32 nt, Homo Sapiens
gggauucgaguuuggugcuuguccccgucuga

SEQ ID NO: 421459 - RNA, 32 nt, Homo Sapiens
gccccaaguuuugugaaauuuuucauauuuua

SEQ ID NO: 421460 - RNA, 32 nt, Homo Sapiens
uucccaggguaucuguggguugccaggcuggg

SEQ ID NO: 421461 - RNA, 32 nt, Homo Sapiens
gcugcggugucugcugcugcuguccgagcuuc

SEQ ID NO: 421462 - RNA, 32 nt, Homo Sapiens
auugagagcuggugggggugucggcuuaguua

SEQ ID NO: 421463 - RNA, 32 nt, Homo Sapiens
uccuuccuccccacccauuccuuuaaauccgg

SEQ ID NO: 421464 - RNA, 32 nt, Homo Sapiens
cccaugcugcccgugacccaugcagguggucu

SEQ ID NO: 421465 - RNA, 32 nt, Homo Sapiens
ucaaguacaggccggcccgggccgccaccgcc

SEQ ID NO: 421466 - RNA, 32 nt, Homo Sapiens
agccagcccuaucuggcaguccugcuuugcua

SEQ ID NO: 421467 - RNA, 32 nt, Homo Sapiens
cgugucggacgagcacacauacagccgcucaa

SEQ ID NO: 421468 - RNA, 32 nt, Homo Sapiens
aguguguguuuguguguuucaaggucagaaca

SEQ ID NO: 421469 - RNA, 32 nt, Homo Sapiens
uugucaaaaagauaagagauagcaagugucag

SEQ ID NO: 421470 - RNA, 32 nt, Homo Sapiens
uaccauugcuugugucccaccuggaccaguuc

SEQ ID NO: 421471 - RNA, 30 nt, Homo Sapiens
ucuguguaucacccuuggagaagucugcau

SEQ ID NO: 421472 - RNA, 32 nt, Homo Sapiens
gcagaguguuugugucccuggguacuugagau

SEQ ID NO: 421473 - RNA, 32 nt, Homo Sapiens
gccuuugccaauuuuuucagaauccaaacaau

SEQ ID NO: 421474 - RNA, 32 nt, Homo Sapiens
auggaaugaaauaccgugauuaacucauagcu

SEQ ID NO: 421475 - RNA, 32 nt, Homo Sapiens
uuucugcacuuugcugcgaaaagcaaagggcc

SEQ ID NO: 421476 - RNA, 32 nt, Homo Sapiens
augaguacggacagggugggcgggagacugau

SEQ ID NO: 421477 - RNA, 32 nt, Homo Sapiens
cacucacauuggcauuggcccaugaagaucuu

SEQ ID NO: 421478 - RNA, 32 nt, Homo Sapiens
caaggccccucggcugccccuccucccugggc

SEQ ID NO: 421479 - RNA, 32 nt, Homo Sapiens
ucggccccugcgcuccucgccagccgccacga

SEQ ID NO: 421480 - RNA, 32 nt, Homo Sapiens
aacucuccauuaucuauauaaaauagugacua

SEQ ID NO: 421481 - RNA, 32 nt, Homo Sapiens
gguaaauaagguggcgcauuccuucuacagag

SEQ ID NO: 421482 - RNA, 32 nt, Homo Sapiens
cagaaucaacugaaguuuuguuugcucaucua

SEQ ID NO: 421483 - RNA, 32 nt, Homo Sapiens
ugcuuucucuauagaaccacuaacauauggcu

SEQ ID NO: 421484 - RNA, 32 nt, Homo Sapiens
cccugugccccccaguucuccuccucagccuu

SEQ ID NO: 421485 - RNA, 32 nt, Homo Sapiens
agaguugccauagaagauggcgggaaaaggga

SEQ ID NO: 421486 - RNA, 32 nt, Homo Sapiens
ugccucuugugcuuggugucuuuugcguguac

SEQ ID NO: 421487 - RNA, 32 nt, Homo Sapiens
aucuuuuuccucccuuucccugagagcucaca

SEQ ID NO: 421488 - RNA, 32 nt, Homo Sapiens
gggccuaucggagcaugcugcaggaucgugag

SEQ ID NO: 421489 - RNA, 32 nt, Homo Sapiens
auuuuggggguagaaggcagugagagcgugag

SEQ ID NO: 421490 - RNA, 32 nt, Homo Sapiens
cgcugcguccccagccggggccgagcccuccg

SEQ ID NO: 421491 - RNA, 32 nt, Homo Sapiens
agugugguucccuccccccugcccaucaaccc

SEQ ID NO: 421492 - RNA, 32 nt, Homo Sapiens
cuagggaugacauaagaauuauagcaguacua

SEQ ID NO: 421493 - RNA, 32 nt, Homo Sapiens
cgggaggcgggcgggaggcggacgcggccuaa

SEQ ID NO: 421494 - RNA, 32 nt, Homo Sapiens
guuaaaauacgugugcacaaaaggcaguagaa

SEQ ID NO: 421495 - RNA, 32 nt, Homo Sapiens
uaguugccuucaacuauauauauuuguuauau

SEQ ID NO: 421496 - RNA, 32 nt, Homo Sapiens
ugcuggugaacagccuguuugcuggaauggac

SEQ ID NO: 421497 - RNA, 32 nt, Homo Sapiens
ucucugcgcgggcccucggaggaggcggcggc

SEQ ID NO: 421498 - RNA, 32 nt, Homo Sapiens
gcagcggggcugcugcugaccggagccgccug

SEQ ID NO: 421499 - RNA, 32 nt, Homo Sapiens
guaaaacaaguucauaacaccauuccaagcau

SEQ ID NO: 421500 - RNA, 32 nt, Homo Sapiens
gcagccgcgggcccuuuaagggccgcgaggug

SEQ ID NO: 421501 - RNA, 32 nt, Homo Sapiens
uccuacugcaggucugggcugccaagcuucuu

SEQ ID NO: 421502 - RNA, 32 nt, Homo Sapiens
uggccuuugcucggcccuccccagcgcccggc

SEQ ID NO: 421503 - RNA, 32 nt, Homo Sapiens
ucacugcuuggcuccuuugagccccgggucuc

SEQ ID NO: 421504 - RNA, 32 nt, Homo Sapiens
acuugcauuuuucauuaguagcaacaauagca

SEQ ID NO: 421505 - RNA, 32 nt, Homo Sapiens
aguaucauuaaaaugguuaaguuuacauuuga

SEQ ID NO: 421506 - RNA, 32 nt, Homo Sapiens
agguuggagcagcccugcccagccccguggcc

SEQ ID NO: 421507 - RNA, 32 nt, Homo Sapiens
ugccaggccgggugcugggcacggucccgcga

SEQ ID NO: 421508 - RNA, 32 nt, Homo Sapiens
gaggggcugaggggcggagaggccuggcgggc

SEQ ID NO: 421509 - RNA, 32 nt, Homo Sapiens
guucuuggagaauucuuaaaagaaauuaagaa

SEQ ID NO: 421510 - RNA, 32 nt, Homo Sapiens
uuuagaaauauaauagcugccuuagacauuau

SEQ ID NO: 421511 - RNA, 32 nt, Homo Sapiens
aguugagguuguuuuucuuuuauuuauuuauc

SEQ ID NO: 421512 - RNA, 32 nt, Homo Sapiens
gcgagcuccgggcuccuccacccgccccccac

SEQ ID NO: 421513 - RNA, 32 nt, Homo Sapiens
agugaggaccagcuaggcucucccaggugcaa

SEQ ID NO: 421514 - RNA, 32 nt, Homo Sapiens
guuuagauugcaacagaaggaauuaguuuaga

SEQ ID NO: 421515 - RNA, 32 nt, Homo Sapiens
caugcugcccuuuuccucuccaccucacaggg

SEQ ID NO: 421516 - RNA, 32 nt, Homo Sapiens
cacuuuaucugcaaauguguuccaguuguuau

SEQ ID NO: 421517 - RNA, 32 nt, Homo Sapiens
uguaugucuuuaacuucuuucuuucccauuga

SEQ ID NO: 421518 - RNA, 32 nt, Homo Sapiens
ggucccagcugccugccugccucuuaggaguc

SEQ ID NO: 421519 - RNA, 32 nt, Homo Sapiens
uaacaaaaaugaaauuauuuauuggcgguuau

SEQ ID NO: 421520 - RNA, 32 nt, Homo Sapiens
aggaaggauccggcccgucuccggaggcaagu

SEQ ID NO: 421521 - RNA, 32 nt, Homo Sapiens
acugaggggcuccaggucggcccgcuccggag

SEQ ID NO: 421522 - RNA, 32 nt, Homo Sapiens
cugcgggaccccagcccaaagcggaccuugac

SEQ ID NO: 421523 - RNA, 32 nt, Homo Sapiens
uccucaauacuaguaucaguucuuuggaauac

SEQ ID NO: 421524 - RNA, 32 nt, Homo Sapiens
uuuuucacuguuuccuauuaaucuucagcuga

SEQ ID NO: 421525 - RNA, 32 nt, Homo Sapiens
uguggagggcagaggagaggggacaagacagg

SEQ ID NO: 421526 - RNA, 32 nt, Homo Sapiens
augacggccugccugcaaaccugcuggugggg

SEQ ID NO: 421527 - RNA, 32 nt, Homo Sapiens
ccaacaacuaaaugguuuagauuguuuagcuc

SEQ ID NO: 421528 - RNA, 30 nt, Homo Sapiens
augcguuugcuaaugguagcuaaauaacca

SEQ ID NO: 421529 - RNA, 32 nt, Homo Sapiens
guugauauaauggguuuauacuuuaaaagaua

SEQ ID NO: 421530 - RNA, 32 nt, Homo Sapiens
ggaggggcaggggcucagaacaauauucuaga

SEQ ID NO: 421531 - RNA, 32 nt, Homo Sapiens
gaacugaaugaaaucucagauggcugaaaugu

SEQ ID NO: 421532 - RNA, 32 nt, Homo Sapiens
cacgcagcuccagcccaucuugcugaccuaau

SEQ ID NO: 421533 - RNA, 32 nt, Homo Sapiens
gcacagcucuggugagacggccugggcaggcc

SEQ ID NO: 421534 - RNA, 32 nt, Homo Sapiens
guaaauuauagauuaaaauucuacuuacaucu

SEQ ID NO: 421535 - RNA, 32 nt, Homo Sapiens
gucaguguuuuuaaagcuuccucacguaucug

SEQ ID NO: 421536 - RNA, 32 nt, Homo Sapiens
aggcagacgcgcggccggcggucugggggcgc

SEQ ID NO: 421537 - RNA, 32 nt, Homo Sapiens
auuuuucuguagauuuuguuucguuuugguuu

SEQ ID NO: 421538 - RNA, 32 nt, Homo Sapiens
ccucugcagcagacaggcagggcuugcugugu

SEQ ID NO: 421539 - RNA, 32 nt, Homo Sapiens
ggaggagagucuuaacuuuugcucuuggauuu

SEQ ID NO: 421540 - RNA, 32 nt, Homo Sapiens
agcaccagaggcaaaccaacaaguaguggcca

SEQ ID NO: 421541 - RNA, 32 nt, Homo Sapiens
cagcugcacgacuccagaggcuccacgacuga

SEQ ID NO: 421542 - RNA, 32 nt, Homo Sapiens
guggagcgggguuuagcucaugcaaaagacuu

SEQ ID NO: 421543 - RNA, 32 nt, Homo Sapiens
uaagaaaauaauuuauacuggagagaaauucu

SEQ ID NO: 421544 - RNA, 32 nt, Homo Sapiens
auucacaaacauucuuccuguuuggacucagg

SEQ ID NO: 421545 - RNA, 32 nt, Homo Sapiens
gcuuugacauucaaauuaugugauguaauuua

SEQ ID NO: 421546 - RNA, 32 nt, Homo Sapiens
ccucgaggaugacggugcugcaggaacccguc

SEQ ID NO: 421547 - RNA, 32 nt, Homo Sapiens
accggauccccgcucccgcuggcucgcgccuc

SEQ ID NO: 421548 - RNA, 32 nt, Homo Sapiens
ugguguccugucagcuuccucuuuaggaaccc

SEQ ID NO: 421549 - RNA, 32 nt, Homo Sapiens
cugcccacagaaaggcgacagggaaccccaga

SEQ ID NO: 421550 - RNA, 32 nt, Homo Sapiens
cgccgucccugguggaugcgcugcuggagcag

SEQ ID NO: 421551 - RNA, 32 nt, Homo Sapiens
ugcacagagcaauucauagaaaaugcauagaa

SEQ ID NO: 421552 - RNA, 32 nt, Homo Sapiens
agaauaucuaggacccauguuuuaugcauuca

SEQ ID NO: 421553 - RNA, 32 nt, Homo Sapiens
gaaaauuaacaauuucuaauauuuucaauugu

SEQ ID NO: 421554 - RNA, 32 nt, Homo Sapiens
aaaaagugauuuuucaaucauuuuugguuccu

SEQ ID NO: 421555 - RNA, 32 nt, Homo Sapiens
gccugcccacucccgccgccgccccgcucucg

SEQ ID NO: 421556 - RNA, 27 nt, Homo Sapiens
aaaugaucaguucucuugggguuucca

SEQ ID NO: 421557 - RNA, 32 nt, Homo Sapiens
aagauaacuucaaaauacacuuucuggaggcc

SEQ ID NO: 421558 - RNA, 32 nt, Homo Sapiens
agggccuccgaaaccccaacccugagggagac

SEQ ID NO: 421559 - RNA, 32 nt, Homo Sapiens
aagggaugaaugugaauuaugaacuaguaugu

SEQ ID NO: 421560 - RNA, 32 nt, Homo Sapiens
augcgcaccgcggcgcgcugggcggggcugga

SEQ ID NO: 421561 - RNA, 32 nt, Homo Sapiens
ucagcgagcgcggggggcgagccccgaguccc

SEQ ID NO: 421562 - RNA, 32 nt, Homo Sapiens
gucacgucaucucuaggaaaccuaucucugag

SEQ ID NO: 421563 - RNA, 32 nt, Homo Sapiens
uccugccagucuccgggccgcggccgucugca

SEQ ID NO: 421564 - RNA, 32 nt, Homo Sapiens
uauuaugaguuaacggugauguguguuuuuua

SEQ ID NO: 421565 - RNA, 32 nt, Homo Sapiens
gaaaguucucguucauuggcaacagcagaacc

SEQ ID NO: 421566 - RNA, 32 nt, Homo Sapiens
cgccccaagaacucgagguugugccuugcucu

SEQ ID NO: 421567 - RNA, 32 nt, Homo Sapiens
gcccauacagccucucugaggacucucccugc

SEQ ID NO: 421568 - RNA, 32 nt, Homo Sapiens
ugagaggaaaggaaaagcaucuggcauguguu

SEQ ID NO: 421569 - RNA, 32 nt, Homo Sapiens
uaggcccaggagaggagggaggcaagccaguc

SEQ ID NO: 421570 - RNA, 32 nt, Homo Sapiens
acgcuugaaaaauaaacuauguucucacuaug

SEQ ID NO: 421571 - RNA, 32 nt, Homo Sapiens
uccucccucacaggagccaccaccagccaccu

SEQ ID NO: 421572 - RNA, 30 nt, Homo Sapiens
gcguuauuaugaauauaauaauaaucagcg

SEQ ID NO: 421573 - RNA, 32 nt, Homo Sapiens
aaaucugaaaugacugcaaauuccuagugaau

SEQ ID NO: 421574 - RNA, 32 nt, Homo Sapiens
ccuggcaagauuugcagccugaagccaugggc

SEQ ID NO: 421575 - RNA, 32 nt, Homo Sapiens
uaucgcaggggggugaggcaccccccgcaaug

SEQ ID NO: 421576 - RNA, 32 nt, Homo Sapiens
acucucaugcuucaggugcugucgggguaaaa

SEQ ID NO: 421577 - RNA, 32 nt, Homo Sapiens
gccugggccgucugcccgcagccaugagcgug

SEQ ID NO: 421578 - RNA, 32 nt, Homo Sapiens
guuuaauccucauccuuuaccuuuagacguau

SEQ ID NO: 421579 - RNA, 32 nt, Homo Sapiens
gagauaugaagauuaccucugcuggguuaaga

SEQ ID NO: 421580 - RNA, 32 nt, Homo Sapiens
uaaaagcagaagauagauaaaaaaugauguaa

SEQ ID NO: 421581 - RNA, 32 nt, Homo Sapiens
ugggcugggaaagaggcccacacaggcccugg

SEQ ID NO: 421582 - RNA, 32 nt, Homo Sapiens
guggcugcaaggaagggaaacagucuauuaua

SEQ ID NO: 421583 - RNA, 32 nt, Homo Sapiens
agggggcgacccggcgucuguuagucggcggu

SEQ ID NO: 421584 - RNA, 32 nt, Homo Sapiens
gaccuagcaacaguaacauaagcaaaggagag

SEQ ID NO: 421585 - RNA, 32 nt, Homo Sapiens
aacagagcaaaauaaagguuagauaaguccuu

SEQ ID NO: 421586 - RNA, 32 nt, Homo Sapiens
cuugugguuuagucuuuuuuuuuuuuuuuuuu

SEQ ID NO: 421587 - RNA, 32 nt, Homo Sapiens
guugaaaacuaaaucacaggaggaacugaaag

SEQ ID NO: 421588 - RNA, 32 nt, Homo Sapiens
uuuacgcuguagcagaaccagauggcugagaa

SEQ ID NO: 421589 - RNA, 32 nt, Homo Sapiens
uuguugauuguaguaauuucuauuugcacugu

SEQ ID NO: 421590 - RNA, 32 nt, Homo Sapiens
uugauuuuuuauuuucuuuccugaaauagcuu

SEQ ID NO: 421591 - RNA, 32 nt, Homo Sapiens
gcuggagggagguucggagcgcggccgggcgc

SEQ ID NO: 421592 - RNA, 32 nt, Homo Sapiens
auuggauaauuuuaaagugucuauaauugcag

SEQ ID NO: 421593 - RNA, 30 nt, Homo Sapiens
uuccagcugagaugauuugagucuguccua

SEQ ID NO: 421594 - RNA, 32 nt, Homo Sapiens
cagagcacccccuccacccccaccuugggugu

SEQ ID NO: 421595 - RNA, 32 nt, Homo Sapiens
auggccuagagcacugacuguuaacacaaacg

SEQ ID NO: 421596 - RNA, 32 nt, Homo Sapiens
cuaggcaucgggcggcagcgccgacagcccuu

SEQ ID NO: 421597 - RNA, 32 nt, Homo Sapiens
ggcugccacaguggaauauuaucuuacaagaa

SEQ ID NO: 421598 - RNA, 31 nt, Homo Sapiens
gaauagugaaacacauuccugguuuuugccu

SEQ ID NO: 421599 - RNA, 32 nt, Homo Sapiens
accugcaaucccagugcuuugggaggcugagg

SEQ ID NO: 421600 - RNA, 32 nt, Homo Sapiens
ccaucacguguaauaaagcacccgggaaaggc

SEQ ID NO: 421601 - RNA, 32 nt, Homo Sapiens
ugaagcauuuugggagacgugcugugaagcag

SEQ ID NO: 421602 - RNA, 32 nt, Homo Sapiens
gugagaccucuuguacccuuucucuuggcagu

SEQ ID NO: 421603 - RNA, 32 nt, Homo Sapiens
guccccugcaccuggaggagagcaggcuagag

SEQ ID NO: 421604 - RNA, 32 nt, Homo Sapiens
gccucuccugcacccucagccggcgcgcuucu

SEQ ID NO: 421605 - RNA, 32 nt, Homo Sapiens
guucaucccgcccugcaguucuccuugacuga

SEQ ID NO: 421606 - RNA, 32 nt, Homo Sapiens
accagucugggcaacauagugaaacccugucu

SEQ ID NO: 421607 - RNA, 32 nt, Homo Sapiens
ggccgggcacggcguugggagugcgcggcagg

SEQ ID NO: 421608 - RNA, 32 nt, Homo Sapiens
acaagucaucuguguuuguguuuuccaguuuu

SEQ ID NO: 421609 - RNA, 32 nt, Homo Sapiens
cucuugucugcggcaucugugcucuccgagag

SEQ ID NO: 421610 - RNA, 32 nt, Homo Sapiens
cgaugcugaaauuguuuuuaaauugaaguuuc

SEQ ID NO: 421611 - RNA, 32 nt, Homo Sapiens
aagcccccuccccacaccuggacuccagaauu

SEQ ID NO: 421612 - RNA, 32 nt, Homo Sapiens
gugaagugcuaagggacagugucccaaaccuc

SEQ ID NO: 421613 - RNA, 32 nt, Homo Sapiens
gcuauucguuuuuguucuaagaugcauggaac

SEQ ID NO: 421614 - RNA, 32 nt, Homo Sapiens
aggggccugcaggcugcccggccagcggagcc

SEQ ID NO: 421615 - RNA, 32 nt, Homo Sapiens
gagggaggggagagaccacagccgggugugug

SEQ ID NO: 421616 - RNA, 32 nt, Homo Sapiens
cuucaggacaacacugcacaauggcauccauu

SEQ ID NO: 421617 - RNA, 32 nt, Homo Sapiens
cggaggcuaguguggaagagguccuguccuca

SEQ ID NO: 421618 - RNA, 32 nt, Homo Sapiens
cacagauccuuaucucuccccauccccuagcc

SEQ ID NO: 421619 - RNA, 32 nt, Homo Sapiens
cugcgcguggcuggggaggcgaggccggacgc

SEQ ID NO: 421620 - RNA, 32 nt, Homo Sapiens
uuaauggugacugaaaucaugacugaccgagu

SEQ ID NO: 421621 - RNA, 32 nt, Homo Sapiens
gccgcggagccucccgggccgccgcgaucaug

SEQ ID NO: 421622 - RNA, 32 nt, Homo Sapiens
gggagggagagcccuacagugcguggacuccc

SEQ ID NO: 421623 - RNA, 32 nt, Homo Sapiens
uauuuacauaguuuuaaucauguaauauauac

SEQ ID NO: 421624 - RNA, 28 nt, Homo Sapiens
gcuaugaaagauuuuugaaguuaaagua

SEQ ID NO: 421625 - RNA, 32 nt, Homo Sapiens
uuuguuaauuuaagccauuuugaaagaacuau

SEQ ID NO: 421626 - RNA, 32 nt, Homo Sapiens
uugguuauuuguuuuauuaaaacauguacauc

SEQ ID NO: 421627 - RNA, 30 nt, Homo Sapiens
aggcucugugccaugggggaaaugaaucau

SEQ ID NO: 421628 - RNA, 32 nt, Homo Sapiens
cucacugcacccacccacaacacaugauaaac

SEQ ID NO: 421629 - RNA, 32 nt, Homo Sapiens
uguugauacgauugucuguuaucgaacacauu

SEQ ID NO: 421630 - RNA, 32 nt, Homo Sapiens
acaaucuagaccuggugaucauucgagagcag

SEQ ID NO: 421631 - RNA, 32 nt, Homo Sapiens
gcagcugcuuuggcauccaaagcugugggauc

SEQ ID NO: 421632 - RNA, 32 nt, Homo Sapiens
gaggccagaaaaggcaagggauggauuuuucc

SEQ ID NO: 421633 - RNA, 32 nt, Homo Sapiens
aucucccauucaucucccuccucccaccgugu

SEQ ID NO: 421634 - RNA, 32 nt, Homo Sapiens
cauacugauuuucaaggcagggucuaacccuu

SEQ ID NO: 421635 - RNA, 32 nt, Homo Sapiens
cuucugagggcuguucucccccgggaaccauc

SEQ ID NO: 421636 - RNA, 32 nt, Homo Sapiens
accaauagguaguaauagguggauuucuaaaa

SEQ ID NO: 421637 - RNA, 32 nt, Homo Sapiens
agccagugccccuguuguugauucgaggugaa

SEQ ID NO: 421638 - RNA, 32 nt, Homo Sapiens
cacuuugaaaauauuucuauguaaauuauugu

SEQ ID NO: 421639 - RNA, 32 nt, Homo Sapiens
cugagaaaaauauuuauuaaauaaaacaaaac

SEQ ID NO: 421640 - RNA, 32 nt, Homo Sapiens
guugagguguauuuggugacuuucucugagac

SEQ ID NO: 421641 - RNA, 32 nt, Homo Sapiens
uuaaagagaacuuagaaagaaaaaauagccua

SEQ ID NO: 421642 - RNA, 32 nt, Homo Sapiens
ucugguuuauacacucuagaaaauauaucuug

SEQ ID NO: 421643 - RNA, 32 nt, Homo Sapiens
aaaaugugcaugugccauaaucaaauauauau

SEQ ID NO: 421644 - RNA, 32 nt, Homo Sapiens
ggccggaugcgguggcucacgccuguaauccc

SEQ ID NO: 421645 - RNA, 32 nt, Homo Sapiens
uaacagucuugcaggucucccgagggcagaag

SEQ ID NO: 421646 - RNA, 30 nt, Homo Sapiens
ccaugagagaagcucucagggccugggcgu

SEQ ID NO: 421647 - RNA, 32 nt, Homo Sapiens
cagccucagggccagcacucacucuguccuga

SEQ ID NO: 421648 - RNA, 32 nt, Homo Sapiens
auguaauaaaauguguucuuuguauuugguaa

SEQ ID NO: 421649 - RNA, 32 nt, Homo Sapiens
cuguuagaaaaacagaauuaacaaagacagua

SEQ ID NO: 421650 - RNA, 32 nt, Homo Sapiens
cagcugggaaagggguaacugaagccccagga

SEQ ID NO: 421651 - RNA, 32 nt, Homo Sapiens
uguccaaguucagguuaaaaucuuagaaaauu

SEQ ID NO: 421652 - RNA, 32 nt, Homo Sapiens
gcauugacgaauuugagucuauguaugggcac

SEQ ID NO: 421653 - RNA, 32 nt, Homo Sapiens
aacccugcaaagggcugggacugguggccuua

SEQ ID NO: 421654 - RNA, 32 nt, Homo Sapiens
ggccgagcccugcggcgggcgggaggagguga

SEQ ID NO: 421655 - RNA, 32 nt, Homo Sapiens
ccccguaccaggaagcgcuggggggcagagga

SEQ ID NO: 421656 - RNA, 32 nt, Homo Sapiens
ccugguuuuuucugugacugcuggccuucccu

SEQ ID NO: 421657 - RNA, 32 nt, Homo Sapiens
gcaaaagaacagacucccuuuuucaaacaugg

SEQ ID NO: 421658 - RNA, 29 nt, Homo Sapiens
ggagauggcggaggcgcaaaacagacaca

SEQ ID NO: 421659 - RNA, 32 nt, Homo Sapiens
aggagccccccuccacccccugaaugggugug

SEQ ID NO: 421660 - RNA, 32 nt, Homo Sapiens
uguacauaggacacauuuuuuaucucuaggcu

SEQ ID NO: 421661 - RNA, 32 nt, Homo Sapiens
ccaagguuccagaggcccuaggcgggaugggc

SEQ ID NO: 421662 - RNA, 32 nt, Homo Sapiens
auugacacgguaaauaguauuuccugugugcc

SEQ ID NO: 421663 - RNA, 32 nt, Homo Sapiens
ccggcugugugagcgccaccacgcugcacccc

SEQ ID NO: 421664 - RNA, 32 nt, Homo Sapiens
uacagaagggcaauagccauuauuuuugugga

SEQ ID NO: 421665 - RNA, 32 nt, Homo Sapiens
ccuggccccagcucccaaaaugucugggaugc

SEQ ID NO: 421666 - RNA, 32 nt, Homo Sapiens
ggggcuacagcuugugggacuccaucaaacca

SEQ ID NO: 421667 - RNA, 32 nt, Homo Sapiens
aggggagagcagaggagaagguggugacccug

SEQ ID NO: 421668 - RNA, 32 nt, Homo Sapiens
augagcaggaaaagacccccucaaggcucacg

SEQ ID NO: 421669 - RNA, 32 nt, Homo Sapiens
ucuuccuugucccaagcuuugccuacaucacc

SEQ ID NO: 421670 - RNA, 32 nt, Homo Sapiens
gacuagcugcugcugcugcugcugcugcaaac

SEQ ID NO: 421671 - RNA, 32 nt, Homo Sapiens
uuccagcugcaaacaggagccaugacucccuu

SEQ ID NO: 421672 - RNA, 32 nt, Homo Sapiens
ccucgcauuucccuuccugguauccucuaccc

SEQ ID NO: 421673 - RNA, 29 nt, Homo Sapiens
uauuucauguguauguaacuacuaaauuu

SEQ ID NO: 421674 - RNA, 32 nt, Homo Sapiens
cacacaugacugaguuccuaucccugcacugg

SEQ ID NO: 421675 - RNA, 32 nt, Homo Sapiens
gcccccacuccaguccacuccugaccccucuc

SEQ ID NO: 421676 - RNA, 32 nt, Homo Sapiens
cuggcgaagacggcagaggugcagguccuggu

SEQ ID NO: 421677 - RNA, 32 nt, Homo Sapiens
aucucagcucacuugcagcugccacugcagac

SEQ ID NO: 421678 - RNA, 32 nt, Homo Sapiens
gagaguauuaaaccuaguaggugggcagcccc

SEQ ID NO: 421679 - RNA, 31 nt, Homo Sapiens
uaaaagcuaccugaagccugaguugggaccu

SEQ ID NO: 421680 - RNA, 32 nt, Homo Sapiens
caaccaaauacaacugggccaauauaaacaug

SEQ ID NO: 421681 - RNA, 32 nt, Homo Sapiens
ggugcucccuucacacacccaggcuggagaga

SEQ ID NO: 421682 - RNA, 32 nt, Homo Sapiens
auuuauuauguucuguuuuucuaaauaaccug

SEQ ID NO: 421683 - RNA, 32 nt, Homo Sapiens
augccagagggccagcaggcuccuggcugugc

SEQ ID NO: 421684 - RNA, 32 nt, Homo Sapiens
aauucuauuauguaccuguaaugauaagcauu

SEQ ID NO: 421685 - RNA, 32 nt, Homo Sapiens
gacccuacagagaagcagcagcccaagcggcu

SEQ ID NO: 421686 - RNA, 32 nt, Homo Sapiens
ggggcucggcggggcucugacggcgcggccug

SEQ ID NO: 421687 - RNA, 32 nt, Homo Sapiens
aaugggcuccagggcucuggaucucaucagca

SEQ ID NO: 421688 - RNA, 32 nt, Homo Sapiens
ggggcagaucacaaggucaagcgauugagauc

SEQ ID NO: 421689 - RNA, 32 nt, Homo Sapiens
uucauaccuugcaguucacgggcgaacucaug

SEQ ID NO: 421690 - RNA, 32 nt, Homo Sapiens
uguggccaggcgucuggcaugcugaccacguc

SEQ ID NO: 421691 - RNA, 32 nt, Homo Sapiens
uggaugugaaaccagagaugcccgccaaccug

SEQ ID NO: 421692 - RNA, 32 nt, Homo Sapiens
auagggauauuuuuacugucuuuuuuauuuuu

SEQ ID NO: 421693 - RNA, 32 nt, Homo Sapiens
caguguccugcccugugcccagccccagcugc

SEQ ID NO: 421694 - RNA, 32 nt, Homo Sapiens
ggggcgaggagugaagagcgguggggaaccag

SEQ ID NO: 421695 - RNA, 32 nt, Homo Sapiens
gcccgggaucgggcugggcccgcgcccauggc

SEQ ID NO: 421696 - RNA, 32 nt, Homo Sapiens
aaccuccuccuccuggauucaagcaauucucu

SEQ ID NO: 421697 - RNA, 32 nt, Homo Sapiens
ucgcuggaauccaaccuguugauaagugaugg

SEQ ID NO: 421698 - RNA, 32 nt, Homo Sapiens
ucccucugcugccuccuccccccaccaaguuu

SEQ ID NO: 421699 - RNA, 32 nt, Homo Sapiens
ggcggccgggugagggcggugggagggagcgg

SEQ ID NO: 421700 - RNA, 32 nt, Homo Sapiens
ccucccagcucuucugugcuguccacuuggga

SEQ ID NO: 421701 - RNA, 32 nt, Homo Sapiens
ccagcgcccacccauccgugcccggacccuug

SEQ ID NO: 421702 - RNA, 31 nt, Homo Sapiens
gaucccugcggcugccugcacucuggaccac

SEQ ID NO: 421703 - RNA, 32 nt, Homo Sapiens
gggucgcggccggcgccggccucuccaauggc

SEQ ID NO: 421704 - RNA, 32 nt, Homo Sapiens
gcaaaugaggggcggcgggguggcgggucggg

SEQ ID NO: 421705 - RNA, 32 nt, Homo Sapiens
gagccggaguggucggugggugggauggaggc

SEQ ID NO: 421706 - RNA, 32 nt, Homo Sapiens
guuggugcagaguggaauaacucauggauuau

SEQ ID NO: 421707 - RNA, 32 nt, Homo Sapiens
uuccugcuggugcagguacacacacacacaca

SEQ ID NO: 421708 - RNA, 32 nt, Homo Sapiens
gaccggccgcccagccccagcacggcccgguc

SEQ ID NO: 421709 - RNA, 32 nt, Homo Sapiens
ucuuauauauacauaccuaugauaaaauuuag

SEQ ID NO: 421710 - RNA, 32 nt, Homo Sapiens
cgucagccugacggguggcccaguccucgccg

SEQ ID NO: 421711 - RNA, 32 nt, Homo Sapiens
uccuucucugcccccacccccacaaagcccag

SEQ ID NO: 421712 - RNA, 32 nt, Homo Sapiens
ggauugacaguaacuugguuauacaugacacu

SEQ ID NO: 421713 - RNA, 32 nt, Homo Sapiens
aaggcugugccgagagaguucuuccagucaga

SEQ ID NO: 421714 - RNA, 30 nt, Homo Sapiens
gcgcagcgccgccagcaccaugcgcccccc

SEQ ID NO: 421715 - RNA, 32 nt, Homo Sapiens
uaaguuugguaacagaacaguacucuaaauua

SEQ ID NO: 421716 - RNA, 32 nt, Homo Sapiens
cacaauagagaacuucaaaauaaaacaggugu

SEQ ID NO: 421717 - RNA, 32 nt, Homo Sapiens
ucgggggccuggcggcgggcaagccccgcgug

SEQ ID NO: 421718 - RNA, 32 nt, Homo Sapiens
acgggcacgcaccaccacgucuggcuaauuuu

SEQ ID NO: 421719 - RNA, 32 nt, Homo Sapiens
uccuugcccucccggacuuaucuacucuucac

SEQ ID NO: 421720 - RNA, 32 nt, Homo Sapiens
accgcucccggacagcggccaggccgcgggga

SEQ ID NO: 421721 - RNA, 32 nt, Homo Sapiens
accugacuccucuccccucguuuuuccuucaa

SEQ ID NO: 421722 - RNA, 32 nt, Homo Sapiens
cagcaugcacaugcccucuuucugggaccagg

SEQ ID NO: 421723 - RNA, 32 nt, Homo Sapiens
gucuagaagcaucuagcaguugaguacagaaa

SEQ ID NO: 421724 - RNA, 32 nt, Homo Sapiens
uauauauuaaaaaauguauauagaugucugag

SEQ ID NO: 421725 - RNA, 32 nt, Homo Sapiens
ggacaccuggugugugcagaucagcugcugaa

SEQ ID NO: 421726 - RNA, 32 nt, Homo Sapiens
uguucuuucaguacuuugaggcgacaacuuuc

SEQ ID NO: 421727 - RNA, 32 nt, Homo Sapiens
ugcagugagcuaugaucucaccacuacacucc

SEQ ID NO: 421728 - RNA, 32 nt, Homo Sapiens
gaauauuucgugccuuuuuuuuuuguugucau

SEQ ID NO: 421729 - RNA, 32 nt, Homo Sapiens
guauuagcuccuaacaacacuuugaaguaauu

SEQ ID NO: 421730 - RNA, 32 nt, Homo Sapiens
uugauugcuuugccauccccacagcagcuuuu

SEQ ID NO: 421731 - RNA, 32 nt, Homo Sapiens
acucaguccaaccauuaagugaugcaggcugc

SEQ ID NO: 421732 - RNA, 32 nt, Homo Sapiens
ggugccagagggugggagugggugcgcgugug

SEQ ID NO: 421733 - RNA, 32 nt, Homo Sapiens
gccucuggacuggccugucuggccccugagag

SEQ ID NO: 421734 - RNA, 32 nt, Homo Sapiens
aaugucuuggggguuuugauccugucacugug

SEQ ID NO: 421735 - RNA, 32 nt, Homo Sapiens
ccaauuaauuuaauguaucuugcuuuuguguu

SEQ ID NO: 421736 - RNA, 32 nt, Homo Sapiens
gauguuccgagcucaguggauguuugaacuug

SEQ ID NO: 421737 - RNA, 32 nt, Homo Sapiens
ugagcacuggcgagacccccugugagucuccc

SEQ ID NO: 421738 - RNA, 32 nt, Homo Sapiens
aacagcuuuggcucuacucaguuucuuaaaaa

SEQ ID NO: 421739 - RNA, 32 nt, Homo Sapiens
aucauuacaucauuugugauguugguuuuacc

SEQ ID NO: 421740 - RNA, 32 nt, Homo Sapiens
augcgacaaauaaaguuggggagaugggaauc

SEQ ID NO: 421741 - RNA, 32 nt, Homo Sapiens
cagacccugugcuuucaugaaagugaagaucu

SEQ ID NO: 421742 - RNA, 32 nt, Homo Sapiens
cagugaaaggaauaauaaaauaauuguaauaa

SEQ ID NO: 421743 - RNA, 32 nt, Homo Sapiens
gacuggaagaaagugaaggggagcuccggaag

SEQ ID NO: 421744 - RNA, 32 nt, Homo Sapiens
ggaccgagcuggaggagcuggguguggggugc

SEQ ID NO: 421745 - RNA, 32 nt, Homo Sapiens
cugggugccucgguacuugaauucugucuugu

SEQ ID NO: 421746 - RNA, 32 nt, Homo Sapiens
uugagcaucuggucuggggggaccacuuugau

SEQ ID NO: 421747 - RNA, 28 nt, Homo Sapiens
uguaaaaaagagugacauuugauuccua

SEQ ID NO: 421748 - RNA, 32 nt, Homo Sapiens
aggaauaaauucaaauaccugauugaccaucc

SEQ ID NO: 421749 - RNA, 32 nt, Homo Sapiens
auccucugaaccccaaucccccagccccacug

SEQ ID NO: 421750 - RNA, 32 nt, Homo Sapiens
gcuggcaguuacuguuuuuuuaauccccugaa

SEQ ID NO: 421751 - RNA, 32 nt, Homo Sapiens
acuuuucugcucccuuucuccagaggcagaac

SEQ ID NO: 421752 - RNA, 32 nt, Homo Sapiens
agucauacgggcaacaguaugcggaaaguacg

SEQ ID NO: 421753 - RNA, 32 nt, Homo Sapiens
agcuauucaaagccuuaauugggcaucacuca

SEQ ID NO: 421754 - RNA, 32 nt, Homo Sapiens
gcccgcugcccggcccccgcgauccuguguuc

SEQ ID NO: 421755 - RNA, 32 nt, Homo Sapiens
gaucucucauugggucucuuugggccuuugga

SEQ ID NO: 421756 - RNA, 32 nt, Homo Sapiens
agggcuaaauauauuuauucucauuuguuauu

SEQ ID NO: 421757 - RNA, 32 nt, Homo Sapiens
ucuaagacaggcuggaggaacagugcagacac

SEQ ID NO: 421758 - RNA, 32 nt, Homo Sapiens
cagauggacagauaaaaaagauuuuacguuug

SEQ ID NO: 421759 - RNA, 32 nt, Homo Sapiens
uuagacuugaacaaacaaaacacccaacaaaa

SEQ ID NO: 421760 - RNA, 32 nt, Homo Sapiens
agccugcacucucccugcuccacagcuuucag

SEQ ID NO: 421761 - RNA, 32 nt, Homo Sapiens
gcugcgcgcgcucaugcacgcggccgccccgg

SEQ ID NO: 421762 - RNA, 32 nt, Homo Sapiens
cuccugucuccaugauaacugcauuugguagg

SEQ ID NO: 421763 - RNA, 32 nt, Homo Sapiens
agaggaaggggagagggacgagacccccuguc

SEQ ID NO: 421764 - RNA, 32 nt, Homo Sapiens
aggaaaaccacgugcuccacuccagcucccug

SEQ ID NO: 421765 - RNA, 32 nt, Homo Sapiens
ggagaggcccugggggacccucugaagcauuu

SEQ ID NO: 421766 - RNA, 32 nt, Homo Sapiens
uguaggcucaccuuugccauuucuuaauauug

SEQ ID NO: 421767 - RNA, 32 nt, Homo Sapiens
ugagucccuggccuuuccuuuuguuauaagaa

SEQ ID NO: 421768 - RNA, 31 nt, Homo Sapiens
aguaguaaaacacauuaaagagccuggccac

SEQ ID NO: 421769 - RNA, 32 nt, Homo Sapiens
agaauaguguaaacuucuagcgcuggugaugu

SEQ ID NO: 421770 - RNA, 32 nt, Homo Sapiens
ugugugucccugaaacaaaauugcucuggcuc

SEQ ID NO: 421771 - RNA, 32 nt, Homo Sapiens
gauccuaguaagucagugguaguuuacuguga

SEQ ID NO: 421772 - RNA, 32 nt, Homo Sapiens
cagcuaucaaaauauaaugagaucccaaugau

SEQ ID NO: 421773 - RNA, 32 nt, Homo Sapiens
auugggcagguggucaggggcuuuuuaucgca

SEQ ID NO: 421774 - RNA, 32 nt, Homo Sapiens
ucuuaacaaccuggccgcguuuagaccaagga

SEQ ID NO: 421775 - RNA, 32 nt, Homo Sapiens
gcuguggagcagcauuucccguugccuccaua

SEQ ID NO: 421776 - RNA, 32 nt, Homo Sapiens
auauugaaaaaacuuuuuugacacucccaaga

SEQ ID NO: 421777 - RNA, 32 nt, Homo Sapiens
aagugugugcuaaacaacuaagaauacuaaau

SEQ ID NO: 421778 - RNA, 32 nt, Homo Sapiens
gcaccugugucccccaccuccacccucaaccc

SEQ ID NO: 421779 - RNA, 27 nt, Homo Sapiens
guaauguccuucuuuaucugugauaau

SEQ ID NO: 421780 - RNA, 32 nt, Homo Sapiens
ggcugcccaggccagugcugcagcucugcaga

SEQ ID NO: 421781 - RNA, 28 nt, Homo Sapiens
cucuuaguuacaguaaagcaauuguugc

SEQ ID NO: 421782 - RNA, 32 nt, Homo Sapiens
uggccucugccauaauuuguuguucaacugcu

SEQ ID NO: 421783 - RNA, 32 nt, Homo Sapiens
ccguuggagcccagcugccuguuuucuuuugc

SEQ ID NO: 421784 - RNA, 32 nt, Homo Sapiens
cuccaccacuucuuccuccacccaggaccuaa

SEQ ID NO: 421785 - RNA, 32 nt, Homo Sapiens
uguaggucacauagccacucuuuccuggauug

SEQ ID NO: 421786 - RNA, 32 nt, Homo Sapiens
ggcacugcauucaaauccagucuucauucagc

SEQ ID NO: 421787 - RNA, 32 nt, Homo Sapiens
uccuaaagcugaucuuccugggguucugaagg

SEQ ID NO: 421788 - RNA, 32 nt, Homo Sapiens
gagacgcucacgggaccuugcaguaauccagg

SEQ ID NO: 421789 - RNA, 32 nt, Homo Sapiens
ccagcucccugccuagcauccaugaccuguug

SEQ ID NO: 421790 - RNA, 32 nt, Homo Sapiens
caaauaaggauguaauucaacucucaaguuac

SEQ ID NO: 421791 - RNA, 32 nt, Homo Sapiens
caucuguaaaaugagacauccccucauugugu

SEQ ID NO: 421792 - RNA, 32 nt, Homo Sapiens
gcaucagaggggccuguggcuaaggcuguccu

SEQ ID NO: 421793 - RNA, 32 nt, Homo Sapiens
uuuuacuaugccuguugaucuaugggaaaucu

SEQ ID NO: 421794 - RNA, 32 nt, Homo Sapiens
ggagguaaccccacacgagacauucagugaca

SEQ ID NO: 421795 - RNA, 32 nt, Homo Sapiens
guccucaggagcugugggguccccugcuagaa

SEQ ID NO: 421796 - RNA, 32 nt, Homo Sapiens
gaucuuggcucacugcaacuuccacuucccgg

SEQ ID NO: 421797 - RNA, 32 nt, Homo Sapiens
ugauggaagauauuuuuuauacuuaauugcag

SEQ ID NO: 421798 - RNA, 32 nt, Homo Sapiens
uaauaagauaaaaucuauuaaauuuuucuccu

SEQ ID NO: 421799 - RNA, 32 nt, Homo Sapiens
uuacuuguuaaaauugugaaaacucuguugug

SEQ ID NO: 421800 - RNA, 32 nt, Homo Sapiens
uuccuccgggagcggcuguugggcuggaucca

SEQ ID NO: 421801 - RNA, 32 nt, Homo Sapiens
auucgcuccaugagaucaagggaacaagagug

SEQ ID NO: 421802 - RNA, 32 nt, Homo Sapiens
aucagcucuauaagagcuggaugcacaucagg

SEQ ID NO: 421803 - RNA, 32 nt, Homo Sapiens
uuuuaugaagaugguuuuuaaaacuuuuguuu

SEQ ID NO: 421804 - RNA, 32 nt, Homo Sapiens
gucuucacugagaggcaggggcccguuuccua

SEQ ID NO: 421805 - RNA, 32 nt, Homo Sapiens
cuggccuagucccuuccacacccccaccccuu

SEQ ID NO: 421806 - RNA, 32 nt, Homo Sapiens
accucacaggaaaaaugguaaguucuaaguuu

SEQ ID NO: 421807 - RNA, 32 nt, Homo Sapiens
uugcacacccacucagcuccgugaacuuguga

SEQ ID NO: 421808 - RNA, 32 nt, Homo Sapiens
ucuuauucuuugcauguuuaaacacuuuaaaa

SEQ ID NO: 421809 - RNA, 32 nt, Homo Sapiens
cggcgauggugcucggggcgccgcagagccgg

SEQ ID NO: 421810 - RNA, 32 nt, Homo Sapiens
auccucuaggaaagaugcggcagcucaaaggg

SEQ ID NO: 421811 - RNA, 32 nt, Homo Sapiens
uuggugaucauuuaagcaggauccaaagaagu

SEQ ID NO: 421812 - RNA, 32 nt, Homo Sapiens
aagaugguagcagaaacugaaguuguaaagac

SEQ ID NO: 421813 - RNA, 32 nt, Homo Sapiens
aacaggcucuccuggguccugcagguguacag

SEQ ID NO: 421814 - RNA, 32 nt, Homo Sapiens
caugccccgcgcugcgccuugcccggcccccg

SEQ ID NO: 421815 - RNA, 32 nt, Homo Sapiens
gcaggcguggagugcagcgucugcccggaaac

SEQ ID NO: 421816 - RNA, 32 nt, Homo Sapiens
uagauguaguaaaagagaguguuugagagcag

SEQ ID NO: 421817 - RNA, 32 nt, Homo Sapiens
cucucccaccaccugcccuuucucugagggac

SEQ ID NO: 421818 - RNA, 32 nt, Homo Sapiens
uuggagccucgggcuccuggggugcagggugc

SEQ ID NO: 421819 - RNA, 32 nt, Homo Sapiens
auauccaagacaugaagauaucaguucaacaa

SEQ ID NO: 421820 - RNA, 32 nt, Homo Sapiens
gauggaguggucaaaaucauaagguuguagca

SEQ ID NO: 421821 - RNA, 32 nt, Homo Sapiens
cgccagcgaccccagcagcgcugcggacggug

SEQ ID NO: 421822 - RNA, 32 nt, Homo Sapiens
cagggccccgacgguuuagacgucugugccac

SEQ ID NO: 421823 - RNA, 32 nt, Homo Sapiens
cccagccacugugccacccccagcccccaccc

SEQ ID NO: 421824 - RNA, 27 nt, Homo Sapiens
ccucuugcccucuucagcuuccggugu

SEQ ID NO: 421825 - RNA, 32 nt, Homo Sapiens
aagucagaauuugaacucaggcaguuuaccuc

SEQ ID NO: 421826 - RNA, 32 nt, Homo Sapiens
aggcguuguaaguccgcccagcuccccacuug

SEQ ID NO: 421827 - RNA, 32 nt, Homo Sapiens
auuacagccagaccucuggcugcagaggaguc

SEQ ID NO: 421828 - RNA, 32 nt, Homo Sapiens
agaaaugggauuggcucuuguuuucugcaagu

SEQ ID NO: 421829 - RNA, 32 nt, Homo Sapiens
aaacgcaccgacacgcugcuguggggucccgg

SEQ ID NO: 421830 - RNA, 32 nt, Homo Sapiens
ccaggcccugccggacccggcgccgucuucuc

SEQ ID NO: 421831 - RNA, 32 nt, Homo Sapiens
ggagaagaaaaaacaaaacacuugaaccaaga

SEQ ID NO: 421832 - RNA, 32 nt, Homo Sapiens
uuccgcccauucucccucgggucuccccagag

SEQ ID NO: 421833 - RNA, 32 nt, Homo Sapiens
gcccucagagagggcugccaggacgcgagcca

SEQ ID NO: 421834 - RNA, 32 nt, Homo Sapiens
caaaguuguaaaaguagcauggauauguugaa

SEQ ID NO: 421835 - RNA, 32 nt, Homo Sapiens
acgcugggacguaugugccgagggccgcggcg

SEQ ID NO: 421836 - RNA, 32 nt, Homo Sapiens
ggacguggaaaacacuauugcacucuguaaag

SEQ ID NO: 421837 - RNA, 32 nt, Homo Sapiens
ggguuguuguuguuuuagaccauagaguggca

SEQ ID NO: 421838 - RNA, 32 nt, Homo Sapiens
ggggccacacggaacacccccaucccauguuc

SEQ ID NO: 421839 - RNA, 32 nt, Homo Sapiens
uucucugcaaguuuuucuuuuucauuuucuga

SEQ ID NO: 421840 - RNA, 32 nt, Homo Sapiens
cgcagcaaacgcccgccgcggaccgugggccu

SEQ ID NO: 421841 - RNA, 32 nt, Homo Sapiens
ccuccgaagccgggcgugcaugggauggcaga

SEQ ID NO: 421842 - RNA, 32 nt, Homo Sapiens
cgucacaaggauuaaaugacaaagaauacuga

SEQ ID NO: 421843 - RNA, 32 nt, Homo Sapiens
uggggcuaggcuggggcucaccccccucccca

SEQ ID NO: 421844 - RNA, 32 nt, Homo Sapiens
uugccugugucugacgggaccacuacuaaaaa

SEQ ID NO: 421845 - RNA, 32 nt, Homo Sapiens
uaacauaaccgugguccauuugucaaaacuaa

SEQ ID NO: 421846 - RNA, 32 nt, Homo Sapiens
aaagaagcuaaaaaccuugaaaaaagauuaga

SEQ ID NO: 421847 - RNA, 32 nt, Homo Sapiens
agauagaaaagcuuuguuccuaacauaucuuu

SEQ ID NO: 421848 - RNA, 29 nt, Homo Sapiens
uucaauauauguauacaucguggaauggc

SEQ ID NO: 421849 - RNA, 32 nt, Homo Sapiens
uuucuggcgcccagcccggcccgccgcaguac

SEQ ID NO: 421850 - RNA, 29 nt, Homo Sapiens
ugguguggcggacagaggggcugcugccc

SEQ ID NO: 421851 - RNA, 32 nt, Homo Sapiens
cuugccgcugugcaggcccaccucuuuggcuc

SEQ ID NO: 421852 - RNA, 32 nt, Homo Sapiens
uucucuucaagcccaaaccaauucuguuccuu

SEQ ID NO: 421853 - RNA, 32 nt, Homo Sapiens
caaaugcaaccugggccgggccgugcagcucc

SEQ ID NO: 421854 - RNA, 32 nt, Homo Sapiens
cugcagggccuggccucgccucccagggcugu

SEQ ID NO: 421855 - RNA, 32 nt, Homo Sapiens
ggcagcgcauacacuacaauggcugcuggaaa

SEQ ID NO: 421856 - RNA, 32 nt, Homo Sapiens
gccauggagcaacgaggugcuuucucgaaccc

SEQ ID NO: 421857 - RNA, 32 nt, Homo Sapiens
uccaacuucaacaucugugaccucaaggggga

SEQ ID NO: 421858 - RNA, 32 nt, Homo Sapiens
uccaccaaaaauacaaaaaaucugccgggcgu

SEQ ID NO: 421859 - RNA, 32 nt, Homo Sapiens
uccauuuugugccgcuuucccccuucaagagg

SEQ ID NO: 421860 - RNA, 32 nt, Homo Sapiens
uuggagaagacaaagaagauuaaaguuuuccc

SEQ ID NO: 421861 - RNA, 32 nt, Homo Sapiens
cuucgcucaagcaggugaacucugccaggaag

SEQ ID NO: 421862 - RNA, 32 nt, Homo Sapiens
guacuuguguguuuuguguaacuauugaagug

SEQ ID NO: 421863 - RNA, 32 nt, Homo Sapiens
uuuucauuacaauagaaacaugcacauggaaa

SEQ ID NO: 421864 - RNA, 32 nt, Homo Sapiens
cagauggccccgggcggcccagguccucuacu

SEQ ID NO: 421865 - RNA, 32 nt, Homo Sapiens
acaucagaaaauaaaauauucacucuccauua

SEQ ID NO: 421866 - RNA, 32 nt, Homo Sapiens
cuugguuuucccuuugccuucauucugcaagu

SEQ ID NO: 421867 - RNA, 32 nt, Homo Sapiens
ccaggaugacguacaggcugcagaggugaccu

SEQ ID NO: 421868 - RNA, 32 nt, Homo Sapiens
cagguguugcaaaaugauuauaaaagccagaa

SEQ ID NO: 421869 - RNA, 32 nt, Homo Sapiens
aaaaggaaggggauaacucagaggaacagaca

SEQ ID NO: 421870 - RNA, 32 nt, Homo Sapiens
cuucccaggcugggcucugccugucuggugcc

SEQ ID NO: 421871 - RNA, 32 nt, Homo Sapiens
ggugcguccugguccaccauggccaaaccaac

SEQ ID NO: 421872 - RNA, 32 nt, Homo Sapiens
gaguauaugcaaacgguuuuguaguuaacacu

SEQ ID NO: 421873 - RNA, 32 nt, Homo Sapiens
caaaggagccccacauaugcaggccuuacacu

SEQ ID NO: 421874 - RNA, 32 nt, Homo Sapiens
accccuucucccuguuucuugcaugaauuaag

SEQ ID NO: 421875 - RNA, 32 nt, Homo Sapiens
uuugagagaacauacaccuugccuuccagaua

SEQ ID NO: 421876 - RNA, 32 nt, Homo Sapiens
cugauucucuuaaauuuggguugcaaagcuau

SEQ ID NO: 421877 - RNA, 32 nt, Homo Sapiens
gauauuuggcaaaaucagguggucauuuacug

SEQ ID NO: 421878 - RNA, 32 nt, Homo Sapiens
ccacagguacagagccacaggaccccaagaau

SEQ ID NO: 421879 - RNA, 32 nt, Homo Sapiens
cuuccuagacucugaaguuucuuucuuucaua

SEQ ID NO: 421880 - RNA, 32 nt, Homo Sapiens
cggcuuucagaguacaauaaacagggaaugag

SEQ ID NO: 421881 - RNA, 32 nt, Homo Sapiens
cacauuccgcgugcaucgcgugcgcaaugaaa

SEQ ID NO: 421882 - RNA, 31 nt, Homo Sapiens
ucccaccagccccagaacccucuggggaaga

SEQ ID NO: 421883 - RNA, 32 nt, Homo Sapiens
cgagggcuggcuguuuuacaccggucacauuu

SEQ ID NO: 421884 - RNA, 32 nt, Homo Sapiens
ugcuucuauuuuuucuucuccccuaccuguua

SEQ ID NO: 421885 - RNA, 32 nt, Homo Sapiens
uuggagacccagcagccuguagguggagggug

SEQ ID NO: 421886 - RNA, 32 nt, Homo Sapiens
gcuuuuuugugaaacucagaucagccacccag

SEQ ID NO: 421887 - RNA, 32 nt, Homo Sapiens
aaaacggaaaauuugcuagaaucaagaaugau

SEQ ID NO: 421888 - RNA, 32 nt, Homo Sapiens
gcaacuucacuagggguuuucuuaagggauaa

SEQ ID NO: 421889 - RNA, 32 nt, Homo Sapiens
ggcacgaggcggaggaggcgaggagcgccggg

SEQ ID NO: 421890 - RNA, 32 nt, Homo Sapiens
ucaacugguaaggaugaacugacaccuugagg

SEQ ID NO: 421891 - RNA, 32 nt, Homo Sapiens
gggcuuaguaucaggaagacuccaucauuuuc

SEQ ID NO: 421892 - RNA, 32 nt, Homo Sapiens
uugacagaaauuggaguuuuaaaauuaugugu

SEQ ID NO: 421893 - RNA, 32 nt, Homo Sapiens
ucccaugccucuauguuacccaucugugucuc

SEQ ID NO: 421894 - RNA, 32 nt, Homo Sapiens
guucggcgugggggccguuggcuccagacaaa

SEQ ID NO: 421895 - RNA, 32 nt, Homo Sapiens
gcauuaaaaaauuuuucaagcugggcguagug

SEQ ID NO: 421896 - RNA, 32 nt, Homo Sapiens
gauggagucaguggggcauugcagcuuggaau

SEQ ID NO: 421897 - RNA, 32 nt, Homo Sapiens
ucggcucugugguuguggacaccuggcagaac

SEQ ID NO: 421898 - RNA, 32 nt, Homo Sapiens
cacaauguccugccuuuggaaaagcagaacaa

SEQ ID NO: 421899 - RNA, 32 nt, Homo Sapiens
guaacaacaacaaaguuuauuugagaggagga

SEQ ID NO: 421900 - RNA, 32 nt, Homo Sapiens
uagauaacuacauuggugaaauuuaaggccau

SEQ ID NO: 421901 - RNA, 32 nt, Homo Sapiens
gcgugucggaggugguggugaacaggguggau

SEQ ID NO: 421902 - RNA, 32 nt, Homo Sapiens
uuacuugucgagggccuuagcggccgccguga

SEQ ID NO: 421903 - RNA, 31 nt, Homo Sapiens
ggaagcccauggaugaaguccacaggccagc

SEQ ID NO: 421904 - RNA, 32 nt, Homo Sapiens
aauucagggaaguuaucuccauaagugcuuua

SEQ ID NO: 421905 - RNA, 32 nt, Homo Sapiens
auaagcaaggacuuagagcugcuucugaguga

SEQ ID NO: 421906 - RNA, 32 nt, Homo Sapiens
uguggugcuuugcuagauaggacgguuuuugc

SEQ ID NO: 421907 - RNA, 32 nt, Homo Sapiens
agcucuggggcggcgagacuggcugggaggag

SEQ ID NO: 421908 - RNA, 32 nt, Homo Sapiens
ucaucguagagcuugguggccgagcuuggccc

SEQ ID NO: 421909 - RNA, 32 nt, Homo Sapiens
cgagggacgaacgggaagccgggagcucggcc

SEQ ID NO: 421910 - RNA, 32 nt, Homo Sapiens
ggggcugaacgccugucuuccaggcgcacggc

SEQ ID NO: 421911 - RNA, 32 nt, Homo Sapiens
cgcacuaggaauauagcagagaagacaagugg

SEQ ID NO: 421912 - RNA, 32 nt, Homo Sapiens
ugagucuguauuacuaauggauaagucaaauc

SEQ ID NO: 421913 - RNA, 32 nt, Homo Sapiens
uuaacuauaaaguaguacauguacauuauaua

SEQ ID NO: 421914 - RNA, 32 nt, Homo Sapiens
cacugagaacuaaaugcuguaccacagagccg

SEQ ID NO: 421915 - RNA, 32 nt, Homo Sapiens
gcucaguuugcaggcccaggcccgcaggccca

SEQ ID NO: 421916 - RNA, 32 nt, Homo Sapiens
ugccggcgggcuccguggggcccuggagcuga

SEQ ID NO: 421917 - RNA, 32 nt, Homo Sapiens
agaaauagacaaaaaccacugcauaguguaag

SEQ ID NO: 421918 - RNA, 32 nt, Homo Sapiens
cuggcucguagccccagaauggcgcuggcccg

SEQ ID NO: 421919 - RNA, 32 nt, Homo Sapiens
uuuuaugacaaugauucaguaaugguaauuuu

SEQ ID NO: 421920 - RNA, 32 nt, Homo Sapiens
cuggugggucagucccugcgucugcccccacu

SEQ ID NO: 421921 - RNA, 32 nt, Homo Sapiens
aggucaguccgacgcacagccaugcacaggca

SEQ ID NO: 421922 - RNA, 31 nt, Homo Sapiens
cuuggagcgggccugguucuggggaugguuu

SEQ ID NO: 421923 - RNA, 32 nt, Homo Sapiens
gucacugccggaagagcagcugcccuccgacc

SEQ ID NO: 421924 - RNA, 32 nt, Homo Sapiens
gcagagagccaaaaccagcaucaugauucuau

SEQ ID NO: 421925 - RNA, 32 nt, Homo Sapiens
agcucagaagauagcgugggugaggcauacgu

SEQ ID NO: 421926 - RNA, 32 nt, Homo Sapiens
ucuuaaaugcuguuuuaguauuuucuaccucu

SEQ ID NO: 421927 - RNA, 32 nt, Homo Sapiens
acuaaggaauaauuuguaaucagaauaacacc

SEQ ID NO: 421928 - RNA, 32 nt, Homo Sapiens
auaucccacaguuuccucaucccuucaccugu

SEQ ID NO: 421929 - RNA, 32 nt, Homo Sapiens
aaaaacaaaacaaaacagaacaaaacguauuu

SEQ ID NO: 421930 - RNA, 32 nt, Homo Sapiens
accaugagggucaggagcaggccggggaccca

SEQ ID NO: 421931 - RNA, 32 nt, Homo Sapiens
acccccacccucgaccacccccgaugggaugg

SEQ ID NO: 421932 - RNA, 32 nt, Homo Sapiens
gcaggcaucacggaaggcucucuucccgucac

SEQ ID NO: 421933 - RNA, 32 nt, Homo Sapiens
gcgccggccccggcucaacggauucuucucgc

SEQ ID NO: 421934 - RNA, 32 nt, Homo Sapiens
uuugccuaaaauuacuaaugcaccacgucagu

SEQ ID NO: 421935 - RNA, 27 nt, Homo Sapiens
aaauggcggaaccgggcggcgcggcgg

SEQ ID NO: 421936 - RNA, 32 nt, Homo Sapiens
ggcggucgccgggacaccccguguguggcagg

SEQ ID NO: 421937 - RNA, 32 nt, Homo Sapiens
ugcucucggaggaugccuagaagauguuggga

SEQ ID NO: 421938 - RNA, 32 nt, Homo Sapiens
uauguguggcuuuggguauacucaggauggaa

SEQ ID NO: 421939 - RNA, 28 nt, Homo Sapiens
uccccaaaauaaaaagaaauauucaaac

SEQ ID NO: 421940 - RNA, 32 nt, Homo Sapiens
uuauuuuauuuuucuagucaaaaacguguuuc

SEQ ID NO: 421941 - RNA, 32 nt, Homo Sapiens
cgcugcuugucuucuuugguucugggaggggu

SEQ ID NO: 421942 - RNA, 32 nt, Homo Sapiens
cccccgccccccagccccccagauggcucccc

SEQ ID NO: 421943 - RNA, 32 nt, Homo Sapiens
aaccaauagauauauauccuacaauugauaua

SEQ ID NO: 421944 - RNA, 32 nt, Homo Sapiens
uugugaucagauuaaaauuacuauuugugcaa

SEQ ID NO: 421945 - RNA, 32 nt, Homo Sapiens
ucuagaaaacugugucccugauuuugcugugc

SEQ ID NO: 421946 - RNA, 32 nt, Homo Sapiens
ugcagaaggcggaaauccugcugugacgccac

SEQ ID NO: 421947 - RNA, 32 nt, Homo Sapiens
acgcauguccccagccuccuggacgagcaaag

SEQ ID NO: 421948 - RNA, 32 nt, Homo Sapiens
uuauuuuucuucauuuucaaagucaagcauau

SEQ ID NO: 421949 - RNA, 32 nt, Homo Sapiens
uaggcggggcggggguugggacccagcgggag

SEQ ID NO: 421950 - RNA, 32 nt, Homo Sapiens
cgagacagguggcaagaaccaugcacuucucc

SEQ ID NO: 421951 - RNA, 32 nt, Homo Sapiens
gagggcgccgagcccugaggccaggcaggccc

SEQ ID NO: 421952 - RNA, 32 nt, Homo Sapiens
cuguucuggcacagggggcuguuccauaugga

SEQ ID NO: 421953 - RNA, 32 nt, Homo Sapiens
auuucccuuucugugucuggcuuauuucccuu

SEQ ID NO: 421954 - RNA, 32 nt, Homo Sapiens
agguuucucagaccacggagaagugacuuuug

SEQ ID NO: 421955 - RNA, 32 nt, Homo Sapiens
ugcucuugacugauaacagcucugucaauauu

SEQ ID NO: 421956 - RNA, 32 nt, Homo Sapiens
gaaggucaugcgaugccuggaacaccccaacg

SEQ ID NO: 421957 - RNA, 32 nt, Homo Sapiens
gcagggacagaaaacaacagagauacauucuc

SEQ ID NO: 421958 - RNA, 32 nt, Homo Sapiens
uggagaauaacaugcauauaauucuguaggaa

SEQ ID NO: 421959 - RNA, 32 nt, Homo Sapiens
ggaaguuuuucugcagagagugcugguaaaga

SEQ ID NO: 421960 - RNA, 32 nt, Homo Sapiens
cacuccccaaccccucuccaggccugucaaga

SEQ ID NO: 421961 - RNA, 32 nt, Homo Sapiens
cucuuuagaauguuauuacgaauagaaagaug

SEQ ID NO: 421962 - RNA, 32 nt, Homo Sapiens
cuauaaacacuuuaaccuaaucaucuguauca

SEQ ID NO: 421963 - RNA, 32 nt, Homo Sapiens
gccgggugaccacgggcccggcccgcagaaag

SEQ ID NO: 421964 - RNA, 32 nt, Homo Sapiens
gaacacauuugugaagauuuguauggaagagc

SEQ ID NO: 421965 - RNA, 32 nt, Homo Sapiens
gcuucaagaacagcugcacaugugccgcuaac

SEQ ID NO: 421966 - RNA, 32 nt, Homo Sapiens
ccagacacugguuucuugcuuuguuuucccug

SEQ ID NO: 421967 - RNA, 32 nt, Homo Sapiens
ugcauuugcauuugcucuuucaucucugcuug

SEQ ID NO: 421968 - RNA, 32 nt, Homo Sapiens
cugauccagaaugucacgcaggaggaugcagg

SEQ ID NO: 421969 - RNA, 32 nt, Homo Sapiens
cacacccuuuucuuuucguccgcucuucgcuu

SEQ ID NO: 421970 - RNA, 32 nt, Homo Sapiens
acuggcucaauccuucugaucauugcagaguu

SEQ ID NO: 421971 - RNA, 32 nt, Homo Sapiens
guauucaagagacaguauugcuaacaucucau

SEQ ID NO: 421972 - RNA, 32 nt, Homo Sapiens
auauucucauuucucucaaagauaagaaugcu

SEQ ID NO: 421973 - RNA, 32 nt, Homo Sapiens
agaaagcuauauuuuccaaaucuuuaggaaaa

SEQ ID NO: 421974 - RNA, 32 nt, Homo Sapiens
ugggagaagguggauaagaggaugcugcucag

SEQ ID NO: 421975 - RNA, 32 nt, Homo Sapiens
cuaccaacaaacaaaaacauacuuggaaccca

SEQ ID NO: 421976 - RNA, 32 nt, Homo Sapiens
uuuuucugccagcuauguugaaugcacaaauu

SEQ ID NO: 421977 - RNA, 32 nt, Homo Sapiens
cuggggcccuguagccaaaaggcuacagcagg

SEQ ID NO: 421978 - RNA, 32 nt, Homo Sapiens
gacauuggcagccagcaggggcggcggcuggu

SEQ ID NO: 421979 - RNA, 32 nt, Homo Sapiens
augcaagucaggccuggcagcuagagcaggag

SEQ ID NO: 421980 - RNA, 32 nt, Homo Sapiens
cgcccgacuugugcgcccgggaaaccccgucg

SEQ ID NO: 421981 - RNA, 32 nt, Homo Sapiens
uauacaaauaccauguaauguguacauauuua

SEQ ID NO: 421982 - RNA, 32 nt, Homo Sapiens
gauggggucucagagcgagagcugcggagggg

SEQ ID NO: 421983 - RNA, 32 nt, Homo Sapiens
auuuucauguuauaaugaaauaguuuaugugu

SEQ ID NO: 421984 - RNA, 32 nt, Homo Sapiens
ggcagggaauauuuaaagcaacuucaaguuua

SEQ ID NO: 421985 - RNA, 32 nt, Homo Sapiens
guccaucacagccaugcugacugagugacugg

SEQ ID NO: 421986 - RNA, 32 nt, Homo Sapiens
uuggggaggggaggguguaucuagcucuaguu

SEQ ID NO: 421987 - RNA, 32 nt, Homo Sapiens
cccaaggcugagugucccaguuuuaucugcuc

SEQ ID NO: 421988 - RNA, 32 nt, Homo Sapiens
gcacucaguuauuugcaaguguauuucuuugc

SEQ ID NO: 421989 - RNA, 31 nt, Homo Sapiens
ugguuauggccgaaaaggauaugcaguaugc

SEQ ID NO: 421990 - RNA, 32 nt, Homo Sapiens
augggauucuuuucaguccaguaucaugaagc

SEQ ID NO: 421991 - RNA, 32 nt, Homo Sapiens
guuggcuuuucucuugacguggaugaaauuga

SEQ ID NO: 421992 - RNA, 32 nt, Homo Sapiens
gggaggagaaauaccgccaggaccugacugug

SEQ ID NO: 421993 - RNA, 32 nt, Homo Sapiens
ucccggggcccggcugccccgagcugagcgga

SEQ ID NO: 421994 - RNA, 32 nt, Homo Sapiens
ucggugcuaagagcuuuuaggauccuacaaaa

SEQ ID NO: 421995 - RNA, 32 nt, Homo Sapiens
gucccucaagucuggucuccuggcagagagca

SEQ ID NO: 421996 - RNA, 32 nt, Homo Sapiens
cuccuuccuaucaguuuguaaauguggucccc

SEQ ID NO: 421997 - RNA, 32 nt, Homo Sapiens
uuggcagcucuuuguauuucagguguugucuu

SEQ ID NO: 421998 - RNA, 32 nt, Homo Sapiens
augcccagaacaggcuugccgucaccaacggc

SEQ ID NO: 421999 - RNA, 32 nt, Homo Sapiens
ucgccgcuucccaccccagacggagcggggac

SEQ ID NO: 422000 - RNA, 32 nt, Homo Sapiens
uguguccccaggauccgucacaguguuccagg

SEQ ID NO: 422001 - RNA, 32 nt, Homo Sapiens
gcagagggccccaggaucuccaaggucccagc

SEQ ID NO: 422002 - RNA, 32 nt, Homo Sapiens
gugugggggaccgcguggagggguggccgcug

SEQ ID NO: 422003 - RNA, 32 nt, Homo Sapiens
ugcacuugagcaugaauggguaguagccaaac

SEQ ID NO: 422004 - RNA, 32 nt, Homo Sapiens
caagcagccucuugccagcagugcagagccug

SEQ ID NO: 422005 - RNA, 32 nt, Homo Sapiens
uguaucggugcgccccaccggccugcagcccc

SEQ ID NO: 422006 - RNA, 32 nt, Homo Sapiens
cugcuugcauucauccccuccuccucaucucu

SEQ ID NO: 422007 - RNA, 32 nt, Homo Sapiens
agccgucuccuacuccaccuuggauuuuucuc

SEQ ID NO: 422008 - RNA, 32 nt, Homo Sapiens
gcauaucauccacagauaugucacuuugaaaa

SEQ ID NO: 422009 - RNA, 32 nt, Homo Sapiens
ugucugcagugaauagcacucccuuugaugug

SEQ ID NO: 422010 - RNA, 32 nt, Homo Sapiens
cugacaagugggugggggugauggcacauuca

SEQ ID NO: 422011 - RNA, 32 nt, Homo Sapiens
cacaggguucugcaucuuagccugcugcuacc

SEQ ID NO: 422012 - RNA, 32 nt, Homo Sapiens
auuugucagcuuugcucagaucagaucgaugg

SEQ ID NO: 422013 - RNA, 32 nt, Homo Sapiens
cgcgcggcucggggcgggcacgggcugcguag

SEQ ID NO: 422014 - RNA, 32 nt, Homo Sapiens
uuuacugaaacacagagaugggaaucugaccc

SEQ ID NO: 422015 - RNA, 32 nt, Homo Sapiens
ucgccgagucuguagccuccccgauccaaguu

SEQ ID NO: 422016 - RNA, 32 nt, Homo Sapiens
guaguuaaacauuucaaauuggcuuuucuccu

SEQ ID NO: 422017 - RNA, 32 nt, Homo Sapiens
ucuguaaaaacgcagaggaaaagagccagaag

SEQ ID NO: 422018 - RNA, 32 nt, Homo Sapiens
aaaaguuuuaucaacuggcuuuuaaguugaga

SEQ ID NO: 422019 - RNA, 32 nt, Homo Sapiens
gggccgggagaagcaugagcgaggggcagauu

SEQ ID NO: 422020 - RNA, 32 nt, Homo Sapiens
uuggggcugaagggagugucagaggcacguug

SEQ ID NO: 422021 - RNA, 32 nt, Homo Sapiens
ugggaaggccccaaggucagcuuaugaaggac

SEQ ID NO: 422022 - RNA, 32 nt, Homo Sapiens
uuucuaauaagauaaacuuuuuugucuuugcu

SEQ ID NO: 422023 - RNA, 32 nt, Homo Sapiens
gucauagguggccuuaggcaucugcauuguuu

SEQ ID NO: 422024 - RNA, 32 nt, Homo Sapiens
gagaccuucuuauauuguuuuauauuguuuga

SEQ ID NO: 422025 - RNA, 32 nt, Homo Sapiens
cacgcccccuccccggacagcaccugccaccu

SEQ ID NO: 422026 - RNA, 32 nt, Homo Sapiens
gaaugauaagauguauuuugaaugaacuguuu

SEQ ID NO: 422027 - RNA, 32 nt, Homo Sapiens
uuuaagucuccauuuugauguuuccaauugcc

SEQ ID NO: 422028 - RNA, 32 nt, Homo Sapiens
ugcaacacugcgccuggcaggcaguggugagc

SEQ ID NO: 422029 - RNA, 32 nt, Homo Sapiens
accaggacauaccaccuggggaugggcugacu

SEQ ID NO: 422030 - RNA, 32 nt, Homo Sapiens
ucuacaaaaaauauaaaaauuaguuaggugug

SEQ ID NO: 422031 - RNA, 32 nt, Homo Sapiens
cacuaucaucaccaccuggggacaccaaucau

SEQ ID NO: 422032 - RNA, 32 nt, Homo Sapiens
gcugagggcggaggcgggagaggcgagcucgc

SEQ ID NO: 422033 - RNA, 32 nt, Homo Sapiens
ugggccuucugacuccuuguccagucaguguu

SEQ ID NO: 422034 - RNA, 32 nt, Homo Sapiens
uucuguguuguaauagcacauuucuguugagu

SEQ ID NO: 422035 - RNA, 32 nt, Homo Sapiens
uuauguuguugaaauuugaauuucacaauucu

SEQ ID NO: 422036 - RNA, 32 nt, Homo Sapiens
cgccuggaaucccagcacuuugggaagccgag

SEQ ID NO: 422037 - RNA, 32 nt, Homo Sapiens
gaauggguggcgcgccagccggucggcagggg

SEQ ID NO: 422038 - RNA, 32 nt, Homo Sapiens
ccccagugcacugaagcuccagcccuuccugg

SEQ ID NO: 422039 - RNA, 32 nt, Homo Sapiens
cuaagugagcaccagcagcuccuggcccaccu

SEQ ID NO: 422040 - RNA, 32 nt, Homo Sapiens
uggggugugcugugucccaccuggcccaccag

SEQ ID NO: 422041 - RNA, 32 nt, Homo Sapiens
uguccagcagagcuauuuccuuccacaggggg

SEQ ID NO: 422042 - RNA, 32 nt, Homo Sapiens
ugauauuucuugcuucucaugaugcauguuuc

SEQ ID NO: 422043 - RNA, 32 nt, Homo Sapiens
agccuugucagccugcccucuucugagguuug

SEQ ID NO: 422044 - RNA, 32 nt, Homo Sapiens
uuuucuuaugagugaaaaagcauucugauaac

SEQ ID NO: 422045 - RNA, 32 nt, Homo Sapiens
agcuguggacauuggaaggcgaaggaagggag

SEQ ID NO: 422046 - RNA, 32 nt, Homo Sapiens
uccauuguucaucauuuugcaaugcagcaagu

SEQ ID NO: 422047 - RNA, 32 nt, Homo Sapiens
acuucugaugugccucccauggagggagccgg

SEQ ID NO: 422048 - RNA, 32 nt, Homo Sapiens
uguucuuugguauugaugugggucagaaggag

SEQ ID NO: 422049 - RNA, 29 nt, Homo Sapiens
uuguauuuuguuuuccugcuagaauguga

SEQ ID NO: 422050 - RNA, 32 nt, Homo Sapiens
gccugcuauaccauggagauguggugcccaag

SEQ ID NO: 422051 - RNA, 32 nt, Homo Sapiens
ugaacugcagcuuuauuuuuugaaauaaaaac

SEQ ID NO: 422052 - RNA, 32 nt, Homo Sapiens
aacaagaugaugcugagcgugaacacaucuga

SEQ ID NO: 422053 - RNA, 32 nt, Homo Sapiens
uccacuccaaauaugcugaacuaagguaucug

SEQ ID NO: 422054 - RNA, 31 nt, Homo Sapiens
ccgagucagugcuuuuaaccauagugcugca

SEQ ID NO: 422055 - RNA, 32 nt, Homo Sapiens
acuuaaccaaaauaagauacugucucagcuag

SEQ ID NO: 422056 - RNA, 32 nt, Homo Sapiens
caaaauaagcaauuauuuucuuuagaggacuu

SEQ ID NO: 422057 - RNA, 32 nt, Homo Sapiens
cuagcuaccugggagguuaaggugggaggauu

SEQ ID NO: 422058 - RNA, 32 nt, Homo Sapiens
cuugaacccacccagcugggacaccaccagaa

SEQ ID NO: 422059 - RNA, 32 nt, Homo Sapiens
agcgacuguggcggccgcaggcgguucugaga

SEQ ID NO: 422060 - RNA, 32 nt, Homo Sapiens
auauguggguggcaaaugggaaugggagaggg

SEQ ID NO: 422061 - RNA, 32 nt, Homo Sapiens
ucacuuucuauagcuuuguuggaccagauggu

SEQ ID NO: 422062 - RNA, 32 nt, Homo Sapiens
augccagccuuuagauugaauuagauuguguu

SEQ ID NO: 422063 - RNA, 32 nt, Homo Sapiens
gcccggggagacggagcccuggcuaaggccgc

SEQ ID NO: 422064 - RNA, 32 nt, Homo Sapiens
uguuuuacauaaauagaauccaaaucguauga

SEQ ID NO: 422065 - RNA, 32 nt, Homo Sapiens
cccggggagucaguuccuccccgggccccuga

SEQ ID NO: 422066 - RNA, 32 nt, Homo Sapiens
gcgccggagccccgguccgccggcgcccagaa

SEQ ID NO: 422067 - RNA, 32 nt, Homo Sapiens
cccccugccaccucagcccccuccagacuuug

SEQ ID NO: 422068 - RNA, 32 nt, Homo Sapiens
aacauuuuguuuucuuuuuucuuuuuuuuuuu

SEQ ID NO: 422069 - RNA, 32 nt, Homo Sapiens
uugcuggauaugauguaccgggagccagcacg

SEQ ID NO: 422070 - RNA, 29 nt, Homo Sapiens
cgugcugccguuccggccacgccgugaag

SEQ ID NO: 422071 - RNA, 32 nt, Homo Sapiens
cuugccaaagaauauucagagagcagcugcua

SEQ ID NO: 422072 - RNA, 32 nt, Homo Sapiens
uauuuucaagauuauucugugcacuuuaaauu

SEQ ID NO: 422073 - RNA, 32 nt, Homo Sapiens
cuucucugugucaucacacauacccacuucac

SEQ ID NO: 422074 - RNA, 32 nt, Homo Sapiens
cacaucccuucccgccuccccccugccuucag

SEQ ID NO: 422075 - RNA, 32 nt, Homo Sapiens
aagcacuauaugccuguaguaccugcacccca

SEQ ID NO: 422076 - RNA, 32 nt, Homo Sapiens
gaccccaggccgcuccucgcucccgccccucg

SEQ ID NO: 422077 - RNA, 32 nt, Homo Sapiens
uagagauggcucuggcugugcauucagcagau

SEQ ID NO: 422078 - RNA, 32 nt, Homo Sapiens
ggcagcuuuacuaagcuggugcuuugcauggu

SEQ ID NO: 422079 - RNA, 32 nt, Homo Sapiens
ucucuaagaugaauaaaggggcaguuaauuaa

SEQ ID NO: 422080 - RNA, 32 nt, Homo Sapiens
ugcccccucguuccuuccccagcccuuuagag

SEQ ID NO: 422081 - RNA, 32 nt, Homo Sapiens
aguucucacccccaccguguauauacaugagc

SEQ ID NO: 422082 - RNA, 32 nt, Homo Sapiens
agcucuugcauccuccucccaacucuagccug

SEQ ID NO: 422083 - RNA, 32 nt, Homo Sapiens
guuuugcugucauuucucuugaugccauauuu

SEQ ID NO: 422084 - RNA, 32 nt, Homo Sapiens
acuauaugaaaaaaccgggugcuucaaaguac

SEQ ID NO: 422085 - RNA, 32 nt, Homo Sapiens
ccaguugcaaaacagccagacuugagcugugc

SEQ ID NO: 422086 - RNA, 32 nt, Homo Sapiens
aaauagacaaugaauguauagaagaaccagua

SEQ ID NO: 422087 - RNA, 32 nt, Homo Sapiens
cuuagauugcaaaauaaaauaguugaacucuc

SEQ ID NO: 422088 - RNA, 32 nt, Homo Sapiens
aaugauucugucaucaccaucuccauggacuu

SEQ ID NO: 422089 - RNA, 32 nt, Homo Sapiens
ccagggagaaaacuuggcauucuuugggaauc

SEQ ID NO: 422090 - RNA, 32 nt, Homo Sapiens
cuugguguggcuguccgccaggaccccaccuu

SEQ ID NO: 422091 - RNA, 32 nt, Homo Sapiens
uuaacucuaaagcacaucugcaugucaguaaa

SEQ ID NO: 422092 - RNA, 32 nt, Homo Sapiens
aguugugugcucuguugaagccccacagagca

SEQ ID NO: 422093 - RNA, 32 nt, Homo Sapiens
aacgcccaucugcucacccaugcccacccagc

SEQ ID NO: 422094 - RNA, 32 nt, Homo Sapiens
cugccgcgacgcccggcccgcagggcagguaa

SEQ ID NO: 422095 - RNA, 32 nt, Homo Sapiens
uugagacucggccgcagcggcgucagacuuuu

SEQ ID NO: 422096 - RNA, 32 nt, Homo Sapiens
ugaacaacucugugcugaauauuaucuaauuu

SEQ ID NO: 422097 - RNA, 32 nt, Homo Sapiens
uuucucagcaagguggagccuggccaugaaua

SEQ ID NO: 422098 - RNA, 32 nt, Homo Sapiens
ugcuauucccgccgcugcuuuagcuacaaaua

SEQ ID NO: 422099 - RNA, 32 nt, Homo Sapiens
accauccuggcuaacacagugaaacccccucu

SEQ ID NO: 422100 - RNA, 32 nt, Homo Sapiens
cuagauuuugcacuaacucauauuagcuuugu

SEQ ID NO: 422101 - RNA, 32 nt, Homo Sapiens
cagcacccuccaggacaggagaucugggaugc

SEQ ID NO: 422102 - RNA, 32 nt, Homo Sapiens
acaaauagcugaggggcggccgggccagaacg

SEQ ID NO: 422103 - RNA, 32 nt, Homo Sapiens
uaccacuugccauuaagcuauuucauaauaaa

SEQ ID NO: 422104 - RNA, 32 nt, Homo Sapiens
ggaggcugcgggggcgggcgggcguauguuga

SEQ ID NO: 422105 - RNA, 32 nt, Homo Sapiens
cagcucuugugcuacagguggggcggagccag

SEQ ID NO: 422106 - RNA, 32 nt, Homo Sapiens
agggcuguucaaguuugguuuuugaauagaca

SEQ ID NO: 422107 - RNA, 32 nt, Homo Sapiens
acguuguucauaucuucucugcucuuaaugaa

SEQ ID NO: 422108 - RNA, 32 nt, Homo Sapiens
ggucuucgcuggcggccgguaacuggcggcgg

SEQ ID NO: 422109 - RNA, 32 nt, Homo Sapiens
aaaauccaaaacaaagaaguaccuggagugga

SEQ ID NO: 422110 - RNA, 32 nt, Homo Sapiens
aggcgcgcgggaacauggggcuguaugcugca

SEQ ID NO: 422111 - RNA, 32 nt, Homo Sapiens
cagcugggccccugcgcccaccuggccuccac

SEQ ID NO: 422112 - RNA, 30 nt, Homo Sapiens
gucaaggccaggcgcgguggcucacgccug

SEQ ID NO: 422113 - RNA, 32 nt, Homo Sapiens
uguuagaagcuaggaaucauggcucugagcgc

SEQ ID NO: 422114 - RNA, 32 nt, Homo Sapiens
caugccaagggaugcagcuguuggugucuguc

SEQ ID NO: 422115 - RNA, 32 nt, Homo Sapiens
caucaauucaacaugucuuggauuuaguuugu

SEQ ID NO: 422116 - RNA, 32 nt, Homo Sapiens
aaggaauuccaagggccacaugcgaguauuaa

SEQ ID NO: 422117 - RNA, 32 nt, Homo Sapiens
aagauagccuuaugaaaaauaugugcugugag

SEQ ID NO: 422118 - RNA, 32 nt, Homo Sapiens
auuauauuuggaaaaauucaugucuguaacua

SEQ ID NO: 422119 - RNA, 32 nt, Homo Sapiens
guauauugucauuugugaaggaaguuggagag

SEQ ID NO: 422120 - RNA, 32 nt, Homo Sapiens
cucccugaaacacuauuaauagcucugccgau

SEQ ID NO: 422121 - RNA, 32 nt, Homo Sapiens
ggcccuuauuuuuucagcuuuuuaugggaaaa

SEQ ID NO: 422122 - RNA, 32 nt, Homo Sapiens
auuuggggagaugcugugggaggauguaaaua

SEQ ID NO: 422123 - RNA, 32 nt, Homo Sapiens
aaaugguaaaauugcauggauuuuguagauac

SEQ ID NO: 422124 - RNA, 32 nt, Homo Sapiens
accgccccuggccucuguaggcuucuuuaacc

SEQ ID NO: 422125 - RNA, 32 nt, Homo Sapiens
ggcaagcagucaacacuuauucaccaucaggc

SEQ ID NO: 422126 - RNA, 32 nt, Homo Sapiens
uuuaacugaagguuuucuuagauauuuaguuu

SEQ ID NO: 422127 - RNA, 32 nt, Homo Sapiens
cccacaugucuggcacgagauaggugcucagu

SEQ ID NO: 422128 - RNA, 32 nt, Homo Sapiens
acauuuuucuugauuucuuuaagagugaacau

SEQ ID NO: 422129 - RNA, 32 nt, Homo Sapiens
cgugacccaagagcuuuuggaguaugaugaac

SEQ ID NO: 422130 - RNA, 32 nt, Homo Sapiens
uguagccccagucauuugauaaagauguuguu

SEQ ID NO: 422131 - RNA, 32 nt, Homo Sapiens
uaaagacaacuuuccaauguaguaucuguagc

SEQ ID NO: 422132 - RNA, 32 nt, Homo Sapiens
cuggguaaagagggugggagggggcuucuccu

SEQ ID NO: 422133 - RNA, 32 nt, Homo Sapiens
cuguuugcugcuuuuucuucccgcucuuaaga

SEQ ID NO: 422134 - RNA, 32 nt, Homo Sapiens
ccugggaggaggcaggggggcugggcgugucc

SEQ ID NO: 422135 - RNA, 32 nt, Homo Sapiens
guguccugcgcgccagcucugcguuuaagaca

SEQ ID NO: 422136 - RNA, 32 nt, Homo Sapiens
uuccuugccuggucugcuuucuuccaaguuug

SEQ ID NO: 422137 - RNA, 32 nt, Homo Sapiens
cccuucuugucccaagguuauaaggccuuguc

SEQ ID NO: 422138 - RNA, 32 nt, Homo Sapiens
gccgcgcugccgucgggacggcugguccccug

SEQ ID NO: 422139 - RNA, 32 nt, Homo Sapiens
cugcccaaacacacucccauggggcaagcacu

SEQ ID NO: 422140 - RNA, 32 nt, Homo Sapiens
cacacggcacuggcagagacgcagaagggaaa

SEQ ID NO: 422141 - RNA, 32 nt, Homo Sapiens
aacccgggagacgggagguuguggugagcuga

SEQ ID NO: 422142 - RNA, 32 nt, Homo Sapiens
uaugaaauucauggcuuuuucuuuuuuugcau

SEQ ID NO: 422143 - RNA, 32 nt, Homo Sapiens
ggcuggucucaaacuucugaccucaggugauc

SEQ ID NO: 422144 - RNA, 32 nt, Homo Sapiens
cguacgagagccgggacgcccggguucagagc

SEQ ID NO: 422145 - RNA, 32 nt, Homo Sapiens
agcugggucuccggggacccugggcccugggc

SEQ ID NO: 422146 - RNA, 32 nt, Homo Sapiens
ggcauugaggcggcgccugacggccacaucug

SEQ ID NO: 422147 - RNA, 32 nt, Homo Sapiens
uggcugcagcggggcccgcguggugccuccug

SEQ ID NO: 422148 - RNA, 32 nt, Homo Sapiens
cuggggcaggcacgcuguggcuggcuacuucc

SEQ ID NO: 422149 - RNA, 32 nt, Homo Sapiens
acuggcacuuuuucuuuuuucucagcaaacug

SEQ ID NO: 422150 - RNA, 32 nt, Homo Sapiens
ggcuggucucaaacuccugaccucaggugauu

SEQ ID NO: 422151 - RNA, 32 nt, Homo Sapiens
gacuggucucaaacuucugaccucaagugauc

SEQ ID NO: 422152 - RNA, 32 nt, Homo Sapiens
agacagagauaaagagagauucauauaaagaa

SEQ ID NO: 422153 - RNA, 32 nt, Homo Sapiens
acugcacaaaaauaaaaauuccaagcugugga

SEQ ID NO: 422154 - RNA, 32 nt, Homo Sapiens
gcugggagucucugcauagauacaaaauauua

SEQ ID NO: 422155 - RNA, 32 nt, Homo Sapiens
ggccagcaggcaccugaguggcugggacaagg

SEQ ID NO: 422156 - RNA, 32 nt, Homo Sapiens
gacugugggaugcaugcccuggcaacauugaa

SEQ ID NO: 422157 - RNA, 32 nt, Homo Sapiens
cuuuguucucugaaacgcaacccugucuagga

SEQ ID NO: 422158 - RNA, 31 nt, Homo Sapiens
uucccucugccggucuccuugcuccaggauc

SEQ ID NO: 422159 - RNA, 30 nt, Homo Sapiens
acucugggaggugauuugcgacuuagccag

SEQ ID NO: 422160 - RNA, 32 nt, Homo Sapiens
auguaaguuuuaauuucuuaaugugcauuuuu

SEQ ID NO: 422161 - RNA, 32 nt, Homo Sapiens
cuaucccaaugugaaauguauuuuggauguau

SEQ ID NO: 422162 - RNA, 25 nt, Homo Sapiens
augcaggacuucuggaggaggagcu

SEQ ID NO: 422163 - RNA, 32 nt, Homo Sapiens
gcccucugcugucucucuggcucucagcggug

SEQ ID NO: 422164 - RNA, 32 nt, Homo Sapiens
agucugugcggcuacagcgggguggagacggc

SEQ ID NO: 422165 - RNA, 32 nt, Homo Sapiens
ccucguccagccgccgggccaagcgccuccgg

SEQ ID NO: 422166 - RNA, 32 nt, Homo Sapiens
aauaccagagaaccagaggcauccucuguauu

SEQ ID NO: 422167 - RNA, 32 nt, Homo Sapiens
ucugaguguagcuccccuggggccuggagggc

SEQ ID NO: 422168 - RNA, 32 nt, Homo Sapiens
gacuuuucaaggaaaugguguuccucaguucu

SEQ ID NO: 422169 - RNA, 32 nt, Homo Sapiens
aaaagaaauaccaugauuuagugaauucugug

SEQ ID NO: 422170 - RNA, 32 nt, Homo Sapiens
cucacugcaaccuccgccucccggguucgggc

SEQ ID NO: 422171 - RNA, 32 nt, Homo Sapiens
ucuacguuauuuacaauuauucagcucuugca

SEQ ID NO: 422172 - RNA, 30 nt, Homo Sapiens
cccacaggcaggcggcggcgcuccacaucu

SEQ ID NO: 422173 - RNA, 32 nt, Homo Sapiens
caagagaugaagaucuugauacagacucauug

SEQ ID NO: 422174 - RNA, 32 nt, Homo Sapiens
ccauucacuagaaaaugagaaaauugucuggg

SEQ ID NO: 422175 - RNA, 32 nt, Homo Sapiens
ggccccuguguaguaguguauagaauucuagc

SEQ ID NO: 422176 - RNA, 32 nt, Homo Sapiens
acugaagggcuuuggcuuuaagucccagacug

SEQ ID NO: 422177 - RNA, 32 nt, Homo Sapiens
ccauagccuuacugaagagacuauuuacaaau

SEQ ID NO: 422178 - RNA, 32 nt, Homo Sapiens
cuguugaugaauuguuucauuauuaaauauau

SEQ ID NO: 422179 - RNA, 32 nt, Homo Sapiens
gaggcccccacuuuccuaacucgugcucccuu

SEQ ID NO: 422180 - RNA, 32 nt, Homo Sapiens
uugcuucguccugucacccccaucaccaauuu

SEQ ID NO: 422181 - RNA, 32 nt, Homo Sapiens
ggaaaguagaucuaaauuuucucuaaaauuuu

SEQ ID NO: 422182 - RNA, 32 nt, Homo Sapiens
ggggccguuggcgaagccagcugcuggaggug

SEQ ID NO: 422183 - RNA, 32 nt, Homo Sapiens
auuuugugcggaaauggggcucccucacagag

SEQ ID NO: 422184 - RNA, 32 nt, Homo Sapiens
uggaugaggaagaugaagaggugcuggaagcc

SEQ ID NO: 422185 - RNA, 32 nt, Homo Sapiens
uuacucacaaaauauauuucugauaaacauua

SEQ ID NO: 422186 - RNA, 32 nt, Homo Sapiens
ccccgcugcgggaggggacggcaccccagugg

SEQ ID NO: 422187 - RNA, 30 nt, Homo Sapiens
uacagaugaaaagaagcaaggaauugauaa

SEQ ID NO: 422188 - RNA, 32 nt, Homo Sapiens
accacaccuggcuauuuuuuuauuuuuaguag

SEQ ID NO: 422189 - RNA, 32 nt, Homo Sapiens
cugcccacccucccacccacccgaccagcaga

SEQ ID NO: 422190 - RNA, 29 nt, Homo Sapiens
agccacacagcgcggaggacgccgugagc

SEQ ID NO: 422191 - RNA, 32 nt, Homo Sapiens
ucuggauggaccagcagagggcacucucaccc

SEQ ID NO: 422192 - RNA, 32 nt, Homo Sapiens
aguggucggggagagacuuugcugggcagcgc

SEQ ID NO: 422193 - RNA, 32 nt, Homo Sapiens
gcaaacauccacagauggcccuggacaucaac

SEQ ID NO: 422194 - RNA, 32 nt, Homo Sapiens
ccaccaccugacguacugccccggggcccuac

SEQ ID NO: 422195 - RNA, 32 nt, Homo Sapiens
ccuggggcugcguccccgcgggacgccagguu

SEQ ID NO: 422196 - RNA, 32 nt, Homo Sapiens
uagucauaauuucauguguuauacaguuuaaa

SEQ ID NO: 422197 - RNA, 32 nt, Homo Sapiens
agcugaaccaugaaacaaacaaaaauccuaaa

SEQ ID NO: 422198 - RNA, 32 nt, Homo Sapiens
ccaacugcccuggaggcauccacacaggggcc

SEQ ID NO: 422199 - RNA, 32 nt, Homo Sapiens
gcaauuuacuguagaaaugauuuuaaauuuuc

SEQ ID NO: 422200 - RNA, 32 nt, Homo Sapiens
gaguucaguuucuaggagccaaugaaacuucc

SEQ ID NO: 422201 - RNA, 32 nt, Homo Sapiens
uuuguugauccccuccucccccacucucaaua

SEQ ID NO: 422202 - RNA, 32 nt, Homo Sapiens
ugccaaugcuauuugugaaauguuuggucuuu

SEQ ID NO: 422203 - RNA, 31 nt, Homo Sapiens
cgugucaugggcccgcgccgccggagccgaa

SEQ ID NO: 422204 - RNA, 32 nt, Homo Sapiens
agaaaccaaaugaucuuaauuguuauugccca

SEQ ID NO: 422205 - RNA, 32 nt, Homo Sapiens
gauguuugugauggucucugguucuugaacag

SEQ ID NO: 422206 - RNA, 32 nt, Homo Sapiens
aaguucuuguuuuucuuucuguagcauggcaa

SEQ ID NO: 422207 - RNA, 32 nt, Homo Sapiens
gauauuuuggguuuuucucuguuuugauagua

SEQ ID NO: 422208 - RNA, 32 nt, Homo Sapiens
uguauuuaugacucugguagaggucuucagac

SEQ ID NO: 422209 - RNA, 32 nt, Homo Sapiens
cuucacgcaccucgguuccucuuccugaaguu

SEQ ID NO: 422210 - RNA, 32 nt, Homo Sapiens
ucggcgcuucgggcaagaacugcaacaggcuc

SEQ ID NO: 422211 - RNA, 32 nt, Homo Sapiens
ggcacgagggucagcagccgccagacuuccug

SEQ ID NO: 422212 - RNA, 32 nt, Homo Sapiens
aagucacuguauuugcaauaaauucuuuucua

SEQ ID NO: 422213 - RNA, 32 nt, Homo Sapiens
cuucuccuccuccuugcguagaaguugaucag

SEQ ID NO: 422214 - RNA, 32 nt, Homo Sapiens
cucuaacagagcugcagaccccugcccugagu

SEQ ID NO: 422215 - RNA, 32 nt, Homo Sapiens
auuuauauuucuucuuuuuaaauuguuuuauu

SEQ ID NO: 422216 - RNA, 32 nt, Homo Sapiens
cagacgugcacacacacacacacacacacaaa

SEQ ID NO: 422217 - RNA, 32 nt, Homo Sapiens
uguguguauguggaaggacggggggagguggg

SEQ ID NO: 422218 - RNA, 32 nt, Homo Sapiens
aaggcaaagaaaguaaaaaaggaauuggccau

SEQ ID NO: 422219 - RNA, 32 nt, Homo Sapiens
uacuuuagcauuaccaugaauguaauaacagu

SEQ ID NO: 422220 - RNA, 32 nt, Homo Sapiens
cgugcgcgggggcgaggaccgcugcuccgggc

SEQ ID NO: 422221 - RNA, 32 nt, Homo Sapiens
cggucccagcgucugucccgccggccgggcgg

SEQ ID NO: 422222 - RNA, 32 nt, Homo Sapiens
gcagaacuggacuaauucuguggacccucaga

SEQ ID NO: 422223 - RNA, 32 nt, Homo Sapiens
aucugcaaaaauagaaaacugccccucuuuuc

SEQ ID NO: 422224 - RNA, 32 nt, Homo Sapiens
aacggagcccgcggccaaacggugccugcggu

SEQ ID NO: 422225 - RNA, 32 nt, Homo Sapiens
cacggaagaaacaaagacaucccggcccaagg

SEQ ID NO: 422226 - RNA, 32 nt, Homo Sapiens
acuuccacugaccggcugcagcucugcaugaa

SEQ ID NO: 422227 - RNA, 32 nt, Homo Sapiens
acgucuuuucuuuuaaagcacccaaaauguca

SEQ ID NO: 422228 - RNA, 32 nt, Homo Sapiens
guaguucugugcccuaucacggccacucccau

SEQ ID NO: 422229 - RNA, 32 nt, Homo Sapiens
gccccgguguccccggccagcacuaugcccau

SEQ ID NO: 422230 - RNA, 32 nt, Homo Sapiens
cugagccccggccucggaccgcccacuccacu

SEQ ID NO: 422231 - RNA, 32 nt, Homo Sapiens
accugcguccugugcuggccgugggcucacaa

SEQ ID NO: 422232 - RNA, 32 nt, Homo Sapiens
cacccucuugucagcaaaacagcuaguuaggu

SEQ ID NO: 422233 - RNA, 32 nt, Homo Sapiens
aaaauuggcuuuauuuuuuucuuaaaaaaaaa

SEQ ID NO: 422234 - RNA, 32 nt, Homo Sapiens
acaccagcuggguccagcuagcagccacuggg

SEQ ID NO: 422235 - RNA, 32 nt, Homo Sapiens
cgccacugcacuccagccugggcgauggagcg

SEQ ID NO: 422236 - RNA, 32 nt, Homo Sapiens
ggucccuucucgcugcggccgcccaggugccc

SEQ ID NO: 422237 - RNA, 32 nt, Homo Sapiens
aaguuagcuaaaccaaaccaacuccucugcuu

SEQ ID NO: 422238 - RNA, 32 nt, Homo Sapiens
ugcaacuugagccuggcugcgaccccugcucu

SEQ ID NO: 422239 - RNA, 32 nt, Homo Sapiens
caauggcuuuaaaaagauuuugaaagcuugcu

SEQ ID NO: 422240 - RNA, 32 nt, Homo Sapiens
ggucucaacucuguuacccaggcuggagugca

SEQ ID NO: 422241 - RNA, 32 nt, Homo Sapiens
ccacuugcuccagcugacaggcaccucuccag

SEQ ID NO: 422242 - RNA, 32 nt, Homo Sapiens
cugggagugugaaacugggagagacgguuaag

SEQ ID NO: 422243 - RNA, 32 nt, Homo Sapiens
uuugaauuuaauguugucaucaucgucaugug

SEQ ID NO: 422244 - RNA, 32 nt, Homo Sapiens
ucuguucguccgucuuuuuuguuguuguuuuu

SEQ ID NO: 422245 - RNA, 32 nt, Homo Sapiens
cugugcgccccgaguaaugugauggagagggu

SEQ ID NO: 422246 - RNA, 32 nt, Homo Sapiens
accugucuguauuuuuaugccucugucuccca

SEQ ID NO: 422247 - RNA, 32 nt, Homo Sapiens
gaccccugucucuauuuuuuuaaauaaauaaa

SEQ ID NO: 422248 - RNA, 32 nt, Homo Sapiens
cccuccucuccucccacccccacaaccaguac

SEQ ID NO: 422249 - RNA, 32 nt, Homo Sapiens
acagaggauugcuggaggagugagaggggcac

SEQ ID NO: 422250 - RNA, 32 nt, Homo Sapiens
cagaccccucccagcccucuccuccuguuccu

SEQ ID NO: 422251 - RNA, 32 nt, Homo Sapiens
uuagggaauuaaagcugcuugucacuuuuugc

SEQ ID NO: 422252 - RNA, 32 nt, Homo Sapiens
uggcugucugguuuuauugcauuuuuaaaaaa

SEQ ID NO: 422253 - RNA, 32 nt, Homo Sapiens
auccgaugagacggaugcucugaugcucugag

SEQ ID NO: 422254 - RNA, 32 nt, Homo Sapiens
ggaccugguguugggccugagccaccucaaca

SEQ ID NO: 422255 - RNA, 32 nt, Homo Sapiens
ugcacaucaauguuugggaaccacugcuguaa

SEQ ID NO: 422256 - RNA, 32 nt, Homo Sapiens
ggccggagcggcgaggccccccuuaccgggcu

SEQ ID NO: 422257 - RNA, 32 nt, Homo Sapiens
ggagcaucccuggccuggggccacaccugcug

SEQ ID NO: 422258 - RNA, 32 nt, Homo Sapiens
gaguccuuucccuuuuugaguuugaaucauag

SEQ ID NO: 422259 - RNA, 32 nt, Homo Sapiens
ccagcuauagcucuggggggccccgcugcagc

SEQ ID NO: 422260 - RNA, 32 nt, Homo Sapiens
cacuuccagcccagccugggcccgcagaccac

SEQ ID NO: 422261 - RNA, 32 nt, Homo Sapiens
gauucuugucuuaagggcaccauuucgcucuc

SEQ ID NO: 422262 - RNA, 32 nt, Homo Sapiens
aguucaaagauguggucauuuacuucucucaa

SEQ ID NO: 422263 - RNA, 32 nt, Homo Sapiens
aguuaucugaaucauuggcauuuauccgauuc

SEQ ID NO: 422264 - RNA, 31 nt, Homo Sapiens
agauaaaaauaaaaguaucucaugaaggaaa

SEQ ID NO: 422265 - RNA, 30 nt, Homo Sapiens
aauacaucacuugccacuaccauugcuguu

SEQ ID NO: 422266 - RNA, 32 nt, Homo Sapiens
gucuguccacacucgauugggccccaggugug

SEQ ID NO: 422267 - RNA, 32 nt, Homo Sapiens
acagguaauccuaauauauccaaauccaacug

SEQ ID NO: 422268 - RNA, 32 nt, Homo Sapiens
ucacaaucccagauggguucuaaugcagcugc

SEQ ID NO: 422269 - RNA, 32 nt, Homo Sapiens
gaggacaaggaccggcugggguucuggaaguu

SEQ ID NO: 422270 - RNA, 32 nt, Homo Sapiens
aaacguaaucccauucacucguucaucuugua

SEQ ID NO: 422271 - RNA, 32 nt, Homo Sapiens
cccuguggcugccuaugggggacugugccuga

SEQ ID NO: 422272 - RNA, 32 nt, Homo Sapiens
accucccacccucugccuuugcuggugcccac

SEQ ID NO: 422273 - RNA, 32 nt, Homo Sapiens
gcccaacagcuguuccuccccuccccgccgac

SEQ ID NO: 422274 - RNA, 32 nt, Homo Sapiens
cacagggugcccucgacagccggguagaaagg

SEQ ID NO: 422275 - RNA, 32 nt, Homo Sapiens
uccaccaggaccccggcccugcacggacccuc

SEQ ID NO: 422276 - RNA, 32 nt, Homo Sapiens
uuccgaaacuaaaagagugggugggaagacua

SEQ ID NO: 422277 - RNA, 32 nt, Homo Sapiens
auuuacaacacuuuaauggguuuuuuaaaaau

SEQ ID NO: 422278 - RNA, 32 nt, Homo Sapiens
caguccugggcuugagacaggcuuugucacua

SEQ ID NO: 422279 - RNA, 32 nt, Homo Sapiens
uccacuaucccaugggcucucucugccccagg

SEQ ID NO: 422280 - RNA, 32 nt, Homo Sapiens
ugccuccuggguucaagcaguucucuugccuc

SEQ ID NO: 422281 - RNA, 27 nt, Homo Sapiens
ggauguggccccaggacccaucccgga

SEQ ID NO: 422282 - RNA, 32 nt, Homo Sapiens
uuauuuauuugguuuggcuccuguuccaauuu

SEQ ID NO: 422283 - RNA, 32 nt, Homo Sapiens
ccggcuacugucagcaaagccugaagaagugg

SEQ ID NO: 422284 - RNA, 32 nt, Homo Sapiens
ccacugacgcccccaucagggauugggccuuc

SEQ ID NO: 422285 - RNA, 32 nt, Homo Sapiens
gaaguuuuuaucuauuugcacguucccuagag

SEQ ID NO: 422286 - RNA, 32 nt, Homo Sapiens
ucaauucugaagaugucuggcuaugacaggau

SEQ ID NO: 422287 - RNA, 32 nt, Homo Sapiens
guguccggguugcuuaggaucccuacagguag

SEQ ID NO: 422288 - RNA, 32 nt, Homo Sapiens
acuggguuaguaauacagauacgugaucuaua

SEQ ID NO: 422289 - RNA, 32 nt, Homo Sapiens
gccgugugcuccuggaggcuggcuggcugucu

SEQ ID NO: 422290 - RNA, 32 nt, Homo Sapiens
agugagccgcugcgcccggcccuggaugccuu

SEQ ID NO: 422291 - RNA, 32 nt, Homo Sapiens
gacuucugaguuaaugcugaugugugacaaag

SEQ ID NO: 422292 - RNA, 32 nt, Homo Sapiens
ugggcuggggacgccugcccuucugucuccgg

SEQ ID NO: 422293 - RNA, 32 nt, Homo Sapiens
ugcugucugcuucagguccagaguuccauggg

SEQ ID NO: 422294 - RNA, 32 nt, Homo Sapiens
cccuauguuucccaggcuggccucgaacuccu

SEQ ID NO: 422295 - RNA, 31 nt, Homo Sapiens
ccuccucuucacugccuccaccugcucccgc

SEQ ID NO: 422296 - RNA, 32 nt, Homo Sapiens
cugaagaugauuaugagcaucgcaaacuuugu

SEQ ID NO: 422297 - RNA, 32 nt, Homo Sapiens
ggguggggacgccuggagcaccaugggggucc

SEQ ID NO: 422298 - RNA, 32 nt, Homo Sapiens
uugaaaaucugcacaauucaguuucagcucug

SEQ ID NO: 422299 - RNA, 32 nt, Homo Sapiens
ccuguggaacaaaguuaauugguuccagagau

SEQ ID NO: 422300 - RNA, 32 nt, Homo Sapiens
aagaggaagcugggggcguccgugguaaaggu

SEQ ID NO: 422301 - RNA, 32 nt, Homo Sapiens
aagacaucaccuuucaguacuccaccuagcuc

SEQ ID NO: 422302 - RNA, 32 nt, Homo Sapiens
aaaugagacuagaagucguuugaaagaagugu

SEQ ID NO: 422303 - RNA, 32 nt, Homo Sapiens
uuuugaagugcuguuuauuaaucuuaguguau

SEQ ID NO: 422304 - RNA, 32 nt, Homo Sapiens
ccccaucacagcacacgcuguccugcauugca

SEQ ID NO: 422305 - RNA, 32 nt, Homo Sapiens
ucuauuuuacaggcugcuccauuacugaggcu

SEQ ID NO: 422306 - RNA, 32 nt, Homo Sapiens
ccuacuccggcaucagcuccguggccggcuuc

SEQ ID NO: 422307 - RNA, 32 nt, Homo Sapiens
augggcugggggugggguggccuucuccaggc

SEQ ID NO: 422308 - RNA, 32 nt, Homo Sapiens
guauuagggguaauauauugcugcugguaauu

SEQ ID NO: 422309 - RNA, 32 nt, Homo Sapiens
aaaauuuuguuuguuuuaaaucuuuguaaagu

SEQ ID NO: 422310 - RNA, 32 nt, Homo Sapiens
gacauugaugauaucuaauugaaccaaguguu

SEQ ID NO: 422311 - RNA, 32 nt, Homo Sapiens
guaacggguugcaccugcuuggcuggauacaa

SEQ ID NO: 422312 - RNA, 32 nt, Homo Sapiens
ucccgucccgccagcccuaucggccucgucac

SEQ ID NO: 422313 - RNA, 32 nt, Homo Sapiens
ucauacaucaagaguuauuuuacaaauaaauu

SEQ ID NO: 422314 - RNA, 32 nt, Homo Sapiens
uuuacaugaagauaagauacucacuguucaug

SEQ ID NO: 422315 - RNA, 32 nt, Homo Sapiens
ucguugagcagugguuuguaauucuccuugaa

SEQ ID NO: 422316 - RNA, 32 nt, Homo Sapiens
cuagggaugacaugauaugcuaccuccuuuuu

SEQ ID NO: 422317 - RNA, 32 nt, Homo Sapiens
gguggcucaucaggccugggccccacacugac

SEQ ID NO: 422318 - RNA, 32 nt, Homo Sapiens
cauauuaacucaccucuuuauucuguggucuu

SEQ ID NO: 422319 - RNA, 32 nt, Homo Sapiens
caugagaagacauuuuaccauuuagcuacuuu

SEQ ID NO: 422320 - RNA, 32 nt, Homo Sapiens
caacgcagcuggaagggguugcccgaaggaug

SEQ ID NO: 422321 - RNA, 32 nt, Homo Sapiens
gccugcuugaaagcacuuucugaccuacagaa

SEQ ID NO: 422322 - RNA, 32 nt, Homo Sapiens
cuuuguauuucauguguaauucaccaauuaag

SEQ ID NO: 422323 - RNA, 32 nt, Homo Sapiens
aauuaauaaaaugguguaguauuugcauauaa

SEQ ID NO: 422324 - RNA, 32 nt, Homo Sapiens
ucuggagugcgcugcagccuucugcugguccu

SEQ ID NO: 422325 - RNA, 32 nt, Homo Sapiens
aaugcuaacaguguugucaacuugucacugau

SEQ ID NO: 422326 - RNA, 32 nt, Homo Sapiens
auuagauaucaagcauuaauauggaaauaaac

SEQ ID NO: 422327 - RNA, 32 nt, Homo Sapiens
ucaggccagggcugggcugugcaccugccucc

SEQ ID NO: 422328 - RNA, 32 nt, Homo Sapiens
ucuuauggugguuucaguuucauuugcauaaa

SEQ ID NO: 422329 - RNA, 32 nt, Homo Sapiens
cuccagugaagcuucuugggguugcuaggaca

SEQ ID NO: 422330 - RNA, 32 nt, Homo Sapiens
cguggcgcaggacacgcggcggcgccucgggc

SEQ ID NO: 422331 - RNA, 32 nt, Homo Sapiens
uguauaccauuaaacuaaaauaacugcaauuu

SEQ ID NO: 422332 - RNA, 32 nt, Homo Sapiens
uucaccaucuaccugcuuggucuuucauugcu

SEQ ID NO: 422333 - RNA, 32 nt, Homo Sapiens
gggcucggugcgacugcgcagcuccucggcgc

SEQ ID NO: 422334 - RNA, 32 nt, Homo Sapiens
cugugcuuuuuaaaaguauacucuguggagua

SEQ ID NO: 422335 - RNA, 32 nt, Homo Sapiens
ugauuuugugauauuuuguacuuuuuaguugu

SEQ ID NO: 422336 - RNA, 32 nt, Homo Sapiens
cuggggagauggggcgggagggccagacucag

SEQ ID NO: 422337 - RNA, 32 nt, Homo Sapiens
uccuucugucuccagggccugaucuuuaccac

SEQ ID NO: 422338 - RNA, 32 nt, Homo Sapiens
ggccuccagcgcugucagcugcacccuggcau

SEQ ID NO: 422339 - RNA, 32 nt, Homo Sapiens
ggcuccuggccccgcuuauuccgcgggggucg

SEQ ID NO: 422340 - RNA, 32 nt, Homo Sapiens
caauuccauugauuuucaauucuuagccacug

SEQ ID NO: 422341 - RNA, 32 nt, Homo Sapiens
uccuagaaguguucuuauaaaggucuaaugua

SEQ ID NO: 422342 - RNA, 32 nt, Homo Sapiens
ccaccuucuggugucaagagggagguggaggc

SEQ ID NO: 422343 - RNA, 32 nt, Homo Sapiens
ucgugaauuacauuaaguuauuuggcaauuua

SEQ ID NO: 422344 - RNA, 32 nt, Homo Sapiens
acacugcagggauggcgcucuccggggugugc

SEQ ID NO: 422345 - RNA, 29 nt, Homo Sapiens
aauuacauaagaauguaccaugccgggaa

SEQ ID NO: 422346 - RNA, 32 nt, Homo Sapiens
auaaaauaacuuacggagauuuuuguaaguau

SEQ ID NO: 422347 - RNA, 32 nt, Homo Sapiens
uaagaagaggaaacagcagagaacuggcugga

SEQ ID NO: 422348 - RNA, 32 nt, Homo Sapiens
cuagagggugccgcccgccgggagccggaggg

SEQ ID NO: 422349 - RNA, 32 nt, Homo Sapiens
gcagccggggagagcaggacgcgccaucucca

SEQ ID NO: 422350 - RNA, 32 nt, Homo Sapiens
cugccucugcuccuugccauuggaguucagcu

SEQ ID NO: 422351 - RNA, 32 nt, Homo Sapiens
uggcgacgggaacgggcaaacacaagcugcua

SEQ ID NO: 422352 - RNA, 32 nt, Homo Sapiens
ccuacaccuucuucauuuccccggggaccaga

SEQ ID NO: 422353 - RNA, 32 nt, Homo Sapiens
aauuguuguuucauuauauaaaaggaacaucu

SEQ ID NO: 422354 - RNA, 32 nt, Homo Sapiens
uggacauguuuccagcucucaguuucuguaau

SEQ ID NO: 422355 - RNA, 32 nt, Homo Sapiens
augugcuguuuuaccuaggaguuagucugcuu

SEQ ID NO: 422356 - RNA, 32 nt, Homo Sapiens
uuuuuggcuuuagauuuaaaguaaauugaaau

SEQ ID NO: 422357 - RNA, 29 nt, Homo Sapiens
ucuuugcuauaauuguauaaagccauaaa

SEQ ID NO: 422358 - RNA, 32 nt, Homo Sapiens
acauaaaguauuugccugcaguuuucauuaaa

SEQ ID NO: 422359 - RNA, 32 nt, Homo Sapiens
ccuuucuuggcacucuguaucucaguacacau

SEQ ID NO: 422360 - RNA, 32 nt, Homo Sapiens
uguguaggugcauuuguuuaaaaaauauaacu

SEQ ID NO: 422361 - RNA, 32 nt, Homo Sapiens
aucucuguaaccauuucuuuuauguacauuug

SEQ ID NO: 422362 - RNA, 32 nt, Homo Sapiens
ucuggugugggaagaagauggggaguuacuug

SEQ ID NO: 422363 - RNA, 32 nt, Homo Sapiens
cucucgauaaagauuauaacaacauaggaaaa

SEQ ID NO: 422364 - RNA, 32 nt, Homo Sapiens
cucaaccccuucucucguaggcccuucuaccc

SEQ ID NO: 422365 - RNA, 32 nt, Homo Sapiens
caaaucuucauuuaucucuggccuuaacccug

SEQ ID NO: 422366 - RNA, 32 nt, Homo Sapiens
acggggagcacaggagcagcacugccggcggg

SEQ ID NO: 422367 - RNA, 32 nt, Homo Sapiens
aguuguucacuuuaacauuuuccuuagauacu

SEQ ID NO: 422368 - RNA, 32 nt, Homo Sapiens
ccaagauuacaaugaaggacuacuccaaauua

SEQ ID NO: 422369 - RNA, 32 nt, Homo Sapiens
ugcaggagagaaugcccagugaccagucacug

SEQ ID NO: 422370 - RNA, 32 nt, Homo Sapiens
acuucagugaauggcccuguaugcgggugacg

SEQ ID NO: 422371 - RNA, 32 nt, Homo Sapiens
auguuucuguugauuuuauucauuuccuggga

SEQ ID NO: 422372 - RNA, 32 nt, Homo Sapiens
gcccugagccccacagaccaccugagacaucc

SEQ ID NO: 422373 - RNA, 32 nt, Homo Sapiens
uuuauauagccuccucaaaagcauacaggcaa

SEQ ID NO: 422374 - RNA, 32 nt, Homo Sapiens
gagaggcagggcccagaacagcuccccuacug

SEQ ID NO: 422375 - RNA, 32 nt, Homo Sapiens
ggauucuuggaaagauucugaaggcuguguug

SEQ ID NO: 422376 - RNA, 32 nt, Homo Sapiens
cuuccuccgucuccgggacggcgugccuggac

SEQ ID NO: 422377 - RNA, 32 nt, Homo Sapiens
gugggaccucgcgcccacgccgcuggggaagu

SEQ ID NO: 422378 - RNA, 32 nt, Homo Sapiens
cgguaacuguccagggacacgcaaccuccuug

SEQ ID NO: 422379 - RNA, 32 nt, Homo Sapiens
uaguuuuuacuuugaaagaauguaacuauugu

SEQ ID NO: 422380 - RNA, 32 nt, Homo Sapiens
ucaaaguaaacauaagggaaaauaucagcucu

SEQ ID NO: 422381 - RNA, 32 nt, Homo Sapiens
aaggaguuauuuacccaaaacacuugcuccaa

SEQ ID NO: 422382 - RNA, 32 nt, Homo Sapiens
auaucacagaaagagacuuuucagaugaaaua

SEQ ID NO: 422383 - RNA, 32 nt, Homo Sapiens
cugucgcuccgugggacuggcucccguuucuc

SEQ ID NO: 422384 - RNA, 32 nt, Homo Sapiens
augccgagcgggugcuacgucccgcggucgga

SEQ ID NO: 422385 - RNA, 30 nt, Homo Sapiens
gcggagcuccgggugccgccgcguccccag

SEQ ID NO: 422386 - RNA, 32 nt, Homo Sapiens
ucccugagcugagaaccagggcccggccugag

SEQ ID NO: 422387 - RNA, 32 nt, Homo Sapiens
gccuggggccccaagccggggcgucugagcuc

SEQ ID NO: 422388 - RNA, 32 nt, Homo Sapiens
accauguuccggcucuuccccagccucagcau

SEQ ID NO: 422389 - RNA, 32 nt, Homo Sapiens
ggcuggccacuccgcggaggccccacugggcc

SEQ ID NO: 422390 - RNA, 32 nt, Homo Sapiens
aagaacccucagcagaauaacaaaaacuuugc

SEQ ID NO: 422391 - RNA, 32 nt, Homo Sapiens
ugagccaagaucgcaccacugcucuccagccu

SEQ ID NO: 422392 - RNA, 32 nt, Homo Sapiens
ucaauauguuuugaaucauuagguaauuuauu

SEQ ID NO: 422393 - RNA, 32 nt, Homo Sapiens
ucugacuuugaaaauaaccaugagagaugcca

SEQ ID NO: 422394 - RNA, 32 nt, Homo Sapiens
auccccaguuucuguaugcagcugcaucaggc

SEQ ID NO: 422395 - RNA, 32 nt, Homo Sapiens
ccacucugugccucaguuuacucuguaguuua

SEQ ID NO: 422396 - RNA, 32 nt, Homo Sapiens
uauaggagacuuaauuuauaauaaugagagca

SEQ ID NO: 422397 - RNA, 32 nt, Homo Sapiens
ugugccaguccuccccuuuuugugugcuaccu

SEQ ID NO: 422398 - RNA, 32 nt, Homo Sapiens
uccuccaggaggaaaggcaagacacgcuuaca

SEQ ID NO: 422399 - RNA, 32 nt, Homo Sapiens
ucccagaagggagagaggcagcaagucagaaa

SEQ ID NO: 422400 - RNA, 32 nt, Homo Sapiens
uguaauauauauaaaauauugugacauguuuu

SEQ ID NO: 422401 - RNA, 32 nt, Homo Sapiens
cuuugcaacauuaaaauacaugcugaacucau

SEQ ID NO: 422402 - RNA, 32 nt, Homo Sapiens
ugaccucgugauccuccugccucauccuccca

SEQ ID NO: 422403 - RNA, 32 nt, Homo Sapiens
aggagguguggacuuuuauauauagaucuaca

SEQ ID NO: 422404 - RNA, 32 nt, Homo Sapiens
cccaccucucugagcucugcauuugucuauuc

SEQ ID NO: 422405 - RNA, 32 nt, Homo Sapiens
cuucugguaggagucgcaaucccagcagcaau

SEQ ID NO: 422406 - RNA, 30 nt, Homo Sapiens
uuuguggcuucugcagcagaagcccggagc

SEQ ID NO: 422407 - RNA, 32 nt, Homo Sapiens
gcugauauauuagaauaauuuuuaaaugucau

SEQ ID NO: 422408 - RNA, 32 nt, Homo Sapiens
auguuucaguuauugugaauaaugcugcuaug

SEQ ID NO: 422409 - RNA, 32 nt, Homo Sapiens
gcaggucggucccagcucuggucucccgcccc

SEQ ID NO: 422410 - RNA, 32 nt, Homo Sapiens
cagccuccuggccaguuucucugcucaguguu

SEQ ID NO: 422411 - RNA, 32 nt, Homo Sapiens
gauccaggcccgacugcgggaccgccccggau

SEQ ID NO: 422412 - RNA, 32 nt, Homo Sapiens
cugaucuccgaccggccugaagcugccggcgc

SEQ ID NO: 422413 - RNA, 32 nt, Homo Sapiens
ccuuaagccccugaggguccuggugacucagg

SEQ ID NO: 422414 - RNA, 32 nt, Homo Sapiens
uauucauuggguuacuccuauuauuaucaagu

SEQ ID NO: 422415 - RNA, 32 nt, Homo Sapiens
ugacugcugacuauauuuuaaaaacaaaauga

SEQ ID NO: 422416 - RNA, 32 nt, Homo Sapiens
acccugcccucccgacccucauguucgaagag

SEQ ID NO: 422417 - RNA, 32 nt, Homo Sapiens
aagcugccugcaagagagaaaaguguauuagu

SEQ ID NO: 422418 - RNA, 32 nt, Homo Sapiens
ucccccuaggccggccguagggaccagacccc

SEQ ID NO: 422419 - RNA, 32 nt, Homo Sapiens
uccuguaguucuaugauuauaugauuuguaaa

SEQ ID NO: 422420 - RNA, 32 nt, Homo Sapiens
uuggcggcaaaguggcgacucaaccuuggggg

SEQ ID NO: 422421 - RNA, 32 nt, Homo Sapiens
agcccggagcccacaaaugcauuuucuccagg

SEQ ID NO: 422422 - RNA, 32 nt, Homo Sapiens
cagcccuccucucccaagaaauccaggcuccu

SEQ ID NO: 422423 - RNA, 32 nt, Homo Sapiens
cuccagcccggcgcagaccccggagcucccga

SEQ ID NO: 422424 - RNA, 32 nt, Homo Sapiens
cgggcgguggaggcggagccggagcgcggcca

SEQ ID NO: 422425 - RNA, 32 nt, Homo Sapiens
gacugagcuucacaccucuggaugccacaugc

SEQ ID NO: 422426 - RNA, 32 nt, Homo Sapiens
ccugagauucuuacuguaaauucaauuggaca

SEQ ID NO: 422427 - RNA, 32 nt, Homo Sapiens
gagugaguaaggaaaccuggcugcccucucca

SEQ ID NO: 422428 - RNA, 32 nt, Homo Sapiens
aagcagcagauuguaauuugguuuauuggaug

SEQ ID NO: 422429 - RNA, 32 nt, Homo Sapiens
ugucuaauguauauuucuaguguuuacagaca

SEQ ID NO: 422430 - RNA, 32 nt, Homo Sapiens
cuguauggcaggaccuccugcuaccgggcuac

SEQ ID NO: 422431 - RNA, 32 nt, Homo Sapiens
accucaauuauuagacaauacuguauagcuag

SEQ ID NO: 422432 - RNA, 32 nt, Homo Sapiens
cagcuucaucaacaccuaccccauggccagag

SEQ ID NO: 422433 - RNA, 32 nt, Homo Sapiens
cgaaaagaaugaaaacagagaaaaaauguaug

SEQ ID NO: 422434 - RNA, 32 nt, Homo Sapiens
gcgggccggggccagcugcucgcgcucggcuc

SEQ ID NO: 422435 - RNA, 32 nt, Homo Sapiens
cuggauuguacaaauaaauguguuguagauga

SEQ ID NO: 422436 - RNA, 32 nt, Homo Sapiens
agguacagugauucagccauuuccauuuguca

SEQ ID NO: 422437 - RNA, 32 nt, Homo Sapiens
gcagaggaauggguagagcccagcuuuagagu

SEQ ID NO: 422438 - RNA, 32 nt, Homo Sapiens
acagacuugggaggagaugcuuguccuagguc

SEQ ID NO: 422439 - RNA, 32 nt, Homo Sapiens
cgacacccccuggccugugccaggcucacggg

SEQ ID NO: 422440 - RNA, 32 nt, Homo Sapiens
ugaaaugguccuguuaaauccaaacgugcuua

SEQ ID NO: 422441 - RNA, 32 nt, Homo Sapiens
cuggccugggccuugcugugggacuggcccug

SEQ ID NO: 422442 - RNA, 32 nt, Homo Sapiens
gcaucgccauucuugcugaaccguuugugauu

SEQ ID NO: 422443 - RNA, 32 nt, Homo Sapiens
uuuugucuauaagauacacaaguauaaaugac

SEQ ID NO: 422444 - RNA, 32 nt, Homo Sapiens
ugaagaacauuuguauuggauuuuaagucgaa

SEQ ID NO: 422445 - RNA, 32 nt, Homo Sapiens
cacuguaaggccugcuggcccaggucccugug

SEQ ID NO: 422446 - RNA, 32 nt, Homo Sapiens
cuuugagggucucaucaugcccacuggguguu

SEQ ID NO: 422447 - RNA, 32 nt, Homo Sapiens
gggagccgagacccuggauggggcuuccagcu

SEQ ID NO: 422448 - RNA, 29 nt, Homo Sapiens
cgccaugagcacuggcaccuucgucgugu

SEQ ID NO: 422449 - RNA, 32 nt, Homo Sapiens
gcaagauugcuuaaaauagcaacacucuauau

SEQ ID NO: 422450 - RNA, 32 nt, Homo Sapiens
gcugguguuuguaguugacauaaaggauuaag

SEQ ID NO: 422451 - RNA, 32 nt, Homo Sapiens
ccucuuugacuucagcuugcauaugggguuga

SEQ ID NO: 422452 - RNA, 30 nt, Homo Sapiens
ucauuucuuacagacggggaaacugaggcu

SEQ ID NO: 422453 - RNA, 32 nt, Homo Sapiens
gucgauuuuuauucagucugaugguucuguuc

SEQ ID NO: 422454 - RNA, 32 nt, Homo Sapiens
cuuuuuuuuggauacagcacaaacuccaguug

SEQ ID NO: 422455 - RNA, 30 nt, Homo Sapiens
uugaggcauaaaagacaaaauguggcuuau

SEQ ID NO: 422456 - RNA, 32 nt, Homo Sapiens
gcgggugaucgucgggucuccacgcgcccggg

SEQ ID NO: 422457 - RNA, 32 nt, Homo Sapiens
gagcuugcagugagccgagaucgcgccaaugc

SEQ ID NO: 422458 - RNA, 32 nt, Homo Sapiens
cgccggcuucccgcugcccccaucgcgcucac

SEQ ID NO: 422459 - RNA, 32 nt, Homo Sapiens
uggagagcgcgcccauguucuccgcuaaggug

SEQ ID NO: 422460 - RNA, 32 nt, Homo Sapiens
ucgcccacguggcgucgucuccaaagggcagg

SEQ ID NO: 422461 - RNA, 32 nt, Homo Sapiens
cgagcuguugugcaauuugcuguauuuaaugc

SEQ ID NO: 422462 - RNA, 32 nt, Homo Sapiens
cgucagacaccugucgacagcccagaugacuc

SEQ ID NO: 422463 - RNA, 32 nt, Homo Sapiens
cgacucgggggcggaccgcggggcggagcugc

SEQ ID NO: 422464 - RNA, 32 nt, Homo Sapiens
ggccucuccgagucuuugucucuuuugggucc

SEQ ID NO: 422465 - RNA, 32 nt, Homo Sapiens
gccgcuagucccugugaagcucugccagggug

SEQ ID NO: 422466 - RNA, 32 nt, Homo Sapiens
ggaguagaacuaacuaccucaccuaaaaaugu

SEQ ID NO: 422467 - RNA, 32 nt, Homo Sapiens
ucauacuuuggagcuuauuaagaucaauuuug

SEQ ID NO: 422468 - RNA, 32 nt, Homo Sapiens
augucuauaugaugaaauguuauuuugccauu

SEQ ID NO: 422469 - RNA, 32 nt, Homo Sapiens
ggagcuuggggcuuccucuccuucgacuccug

SEQ ID NO: 422470 - RNA, 32 nt, Homo Sapiens
gcuaaacugccuguucuagaaagcaucugcuu

SEQ ID NO: 422471 - RNA, 32 nt, Homo Sapiens
auuuuuuuauguucuuuuuuuggucacaggag

SEQ ID NO: 422472 - RNA, 32 nt, Homo Sapiens
acuaaacaaaauacuuccuauuugagcccaug

SEQ ID NO: 422473 - RNA, 32 nt, Homo Sapiens
gugccccccgcgcuccgcuccggcagcuccac

SEQ ID NO: 422474 - RNA, 32 nt, Homo Sapiens
gccgugcaacgcugugucucucacuaaccucc

SEQ ID NO: 422475 - RNA, 32 nt, Homo Sapiens
ucuucgugugcuuuuccaagucuuccuauucc

SEQ ID NO: 422476 - RNA, 32 nt, Homo Sapiens
uuaugcaauuagccucauaguuauuauccaga

SEQ ID NO: 422477 - RNA, 32 nt, Homo Sapiens
agaccacaaggguaaugaccaaauuuaugugg

SEQ ID NO: 422478 - RNA, 32 nt, Homo Sapiens
ccagcucugaccagacuugcugugugaccuug

SEQ ID NO: 422479 - RNA, 32 nt, Homo Sapiens
cccuggucucguccguuuuccuccucagcucu

SEQ ID NO: 422480 - RNA, 31 nt, Homo Sapiens
auccgcagccaacuguguggcgguccccacu

SEQ ID NO: 422481 - RNA, 32 nt, Homo Sapiens
uuagcuggagcugaguagcagcugccugauua

SEQ ID NO: 422482 - RNA, 32 nt, Homo Sapiens
auagggugguguuuuuauuucauuuauuguag

SEQ ID NO: 422483 - RNA, 32 nt, Homo Sapiens
gcaaccuccaccucacagguucaagcgauucu

SEQ ID NO: 422484 - RNA, 32 nt, Homo Sapiens
augacuaguccucauccauguagcaccacuaa

SEQ ID NO: 422485 - RNA, 32 nt, Homo Sapiens
uuuguuaaauguuuucugucuucuguuaagug

SEQ ID NO: 422486 - RNA, 32 nt, Homo Sapiens
ucgcacagucuccuccgcacagggugaggugg

SEQ ID NO: 422487 - RNA, 32 nt, Homo Sapiens
gagcaguccccaguaacagccagcaggaggug

SEQ ID NO: 422488 - RNA, 32 nt, Homo Sapiens
gaauccagugaacaagaaagucuuuaucucuu

SEQ ID NO: 422489 - RNA, 32 nt, Homo Sapiens
auuuugguaucucaagcuuguuuuccagaguu

SEQ ID NO: 422490 - RNA, 32 nt, Homo Sapiens
cauuuucuuucuucucuuuuuguuuggaaaau

SEQ ID NO: 422491 - RNA, 32 nt, Homo Sapiens
gauccucggcuuugccucucccucucccuccc

SEQ ID NO: 422492 - RNA, 32 nt, Homo Sapiens
cagauuuuccagcggaucccccgguggccuca

SEQ ID NO: 422493 - RNA, 32 nt, Homo Sapiens
ugcacagauaaugcacguuuucugguuaagua

SEQ ID NO: 422494 - RNA, 32 nt, Homo Sapiens
gaagagagacugguuguuuuauuuucaaugua

SEQ ID NO: 422495 - RNA, 30 nt, Homo Sapiens
augacggcaguggugccgccuggugaauga

SEQ ID NO: 422496 - RNA, 32 nt, Homo Sapiens
cagaauugaaaauuauaucaacuuaaaauuuu

SEQ ID NO: 422497 - RNA, 32 nt, Homo Sapiens
ugguggaggggaugcaccccaguguccacuuu

SEQ ID NO: 422498 - RNA, 30 nt, Homo Sapiens
agugaggagaagcugaucaguaaguuugac

SEQ ID NO: 422499 - RNA, 32 nt, Homo Sapiens
cugaacaaacaaaacaauuuaauagccaacac

SEQ ID NO: 422500 - RNA, 32 nt, Homo Sapiens
cccaucucuacuaaauacaaaaauuagcuggg

SEQ ID NO: 422501 - RNA, 32 nt, Homo Sapiens
auuucugagagaagaacacugcugauuguggg

SEQ ID NO: 422502 - RNA, 32 nt, Homo Sapiens
uuauucuugaguuaucuaggaauggauuuucc

SEQ ID NO: 422503 - RNA, 31 nt, Homo Sapiens
acugcagagccuagggccugaguuaacucgc

SEQ ID NO: 422504 - RNA, 32 nt, Homo Sapiens
cauggcuugcaucuguuugaaacuacaauuaa

SEQ ID NO: 422505 - RNA, 32 nt, Homo Sapiens
ccucucugccucuggaggagggugggguauuc

SEQ ID NO: 422506 - RNA, 32 nt, Homo Sapiens
gccuagccagaccaaccccagcccagcucucu

SEQ ID NO: 422507 - RNA, 32 nt, Homo Sapiens
caacccccuuuccuccucuccuaagucucuga

SEQ ID NO: 422508 - RNA, 32 nt, Homo Sapiens
uucagugcaacauuucaaaaaauauauaugcu

SEQ ID NO: 422509 - RNA, 32 nt, Homo Sapiens
cgccucccuggcccugagccuucuuuggauag

SEQ ID NO: 422510 - RNA, 32 nt, Homo Sapiens
ugcugcccggacguggaagcagcaagaggcgc

SEQ ID NO: 422511 - RNA, 32 nt, Homo Sapiens
cccagagacaccugugugugucuuaaaacauu

SEQ ID NO: 422512 - RNA, 32 nt, Homo Sapiens
cguuggcaggacucgcugcugcugcugcugcu

SEQ ID NO: 422513 - RNA, 32 nt, Homo Sapiens
uuguuacuuaggaagccuggggagggcagggg

SEQ ID NO: 422514 - RNA, 32 nt, Homo Sapiens
auuuaauguuugguacaaacccagaaagggua

SEQ ID NO: 422515 - RNA, 32 nt, Homo Sapiens
cacugcagggagagggcaggcggcugcugcug

SEQ ID NO: 422516 - RNA, 32 nt, Homo Sapiens
cggaagcacccccucccuccccggcccgugca

SEQ ID NO: 422517 - RNA, 32 nt, Homo Sapiens
cacuuuguauauugugaauauuagcuuuugug

SEQ ID NO: 422518 - RNA, 32 nt, Homo Sapiens
cuuauuuaaacuucuuuuuuuuuuugccuuga

SEQ ID NO: 422519 - RNA, 30 nt, Homo Sapiens
gcauggaugugcgggagcucuucugcuagg

SEQ ID NO: 422520 - RNA, 32 nt, Homo Sapiens
guuuuuaucuuuuuaccuuucauacacuagcc

SEQ ID NO: 422521 - RNA, 32 nt, Homo Sapiens
cgcgcagugcugccaacgccccgguggagaag

SEQ ID NO: 422522 - RNA, 32 nt, Homo Sapiens
ugccuguuagccagucaguuuuagucacugug

SEQ ID NO: 422523 - RNA, 32 nt, Homo Sapiens
guuaacuaugacuggaauucugugauauuuug

SEQ ID NO: 422524 - RNA, 32 nt, Homo Sapiens
acccagcacggcaggcaccugcagcuuccagu

SEQ ID NO: 422525 - RNA, 32 nt, Homo Sapiens
ucaucguauuccugaaauuucuucuuagcugu

SEQ ID NO: 422526 - RNA, 32 nt, Homo Sapiens
uggccgggugcggagcacuuugggaggcugag

SEQ ID NO: 422527 - RNA, 32 nt, Homo Sapiens
aucuuaagcaagaaauacaauauuuuacgaaa

SEQ ID NO: 422528 - RNA, 32 nt, Homo Sapiens
cugucccggagcucaggcccuggugaggggcu

SEQ ID NO: 422529 - RNA, 32 nt, Homo Sapiens
aauggcagcugagacaguccucccugguggca

SEQ ID NO: 422530 - RNA, 32 nt, Homo Sapiens
gaugcuuagaggcuucucaccagagauuggug

SEQ ID NO: 422531 - RNA, 32 nt, Homo Sapiens
gacaggcgccgcgcagcgggcaggggcuugcc

SEQ ID NO: 422532 - RNA, 32 nt, Homo Sapiens
cguucucucucagaucuuugucucgaagggaa

SEQ ID NO: 422533 - RNA, 32 nt, Homo Sapiens
guucaacaucuuccaagugugcugguucugcu

SEQ ID NO: 422534 - RNA, 32 nt, Homo Sapiens
aaaagacuggggugggggugggaggccagcac

SEQ ID NO: 422535 - RNA, 32 nt, Homo Sapiens
cacaagaaagccaugaugugggucuaaaccau

SEQ ID NO: 422536 - RNA, 32 nt, Homo Sapiens
agcagccucucugcacaugcagcccucuccuc

SEQ ID NO: 422537 - RNA, 32 nt, Homo Sapiens
aaacacuuaaaaugguuaaaauggcaaauugu

SEQ ID NO: 422538 - RNA, 32 nt, Homo Sapiens
agacuaugugcacugaaguaaaugggguuggg

SEQ ID NO: 422539 - RNA, 28 nt, Homo Sapiens
agcuugaaagauugacugagauggggag

SEQ ID NO: 422540 - RNA, 32 nt, Homo Sapiens
acucccagggcccaucgucagggucuccauau

SEQ ID NO: 422541 - RNA, 32 nt, Homo Sapiens
acaggcccaggcucagcccgccguggcuggga

SEQ ID NO: 422542 - RNA, 30 nt, Homo Sapiens
agugucaguugugcugcagacaguaugaac

SEQ ID NO: 422543 - RNA, 32 nt, Homo Sapiens
ggguccggggcaggcccggcgcuuugcucccc

SEQ ID NO: 422544 - RNA, 32 nt, Homo Sapiens
aaaacccuucaaggauuacuggauagaauuca

SEQ ID NO: 422545 - RNA, 32 nt, Homo Sapiens
gcuuucaggcuccagaugucagagcacccuug

SEQ ID NO: 422546 - RNA, 28 nt, Homo Sapiens
caacuucagugguuaauuauaaaaguug

SEQ ID NO: 422547 - RNA, 32 nt, Homo Sapiens
gugacccguccauuguggguagcaaucugcgg

SEQ ID NO: 422548 - RNA, 32 nt, Homo Sapiens
auguauauaaauaaaaucauucgacguguaug

SEQ ID NO: 422549 - RNA, 32 nt, Homo Sapiens
aacacuugauaaaaaguucaucagcguaaaua

SEQ ID NO: 422550 - RNA, 32 nt, Homo Sapiens
aagaagcuggaacacagaagagaggagguugu

SEQ ID NO: 422551 - RNA, 32 nt, Homo Sapiens
ugacuccccuccccaacccccucaucuaaaga

SEQ ID NO: 422552 - RNA, 32 nt, Homo Sapiens
gagcccgcuggccccaggaacugaccaugcag

SEQ ID NO: 422553 - RNA, 32 nt, Homo Sapiens
caugcaauuguguuggaaguguccuuggucgc

SEQ ID NO: 422554 - RNA, 32 nt, Homo Sapiens
acaagcaagguuucuggugccuauuuauucau

SEQ ID NO: 422555 - RNA, 32 nt, Homo Sapiens
gggggagcaguagaguggcugcggcuggggag

SEQ ID NO: 422556 - RNA, 32 nt, Homo Sapiens
uuuggauggauaagccugucuaugguacaaaa

SEQ ID NO: 422557 - RNA, 32 nt, Homo Sapiens
cagccguccuccugggguggacccuaguuuaa

SEQ ID NO: 422558 - RNA, 32 nt, Homo Sapiens
uuuuguggauggggacuugugaauuuuucuaa

SEQ ID NO: 422559 - RNA, 32 nt, Homo Sapiens
gagcugagcggcggggggcagugucgccucgg

SEQ ID NO: 422560 - RNA, 32 nt, Homo Sapiens
acauuggcuacaggcucuuccaucucucauga

SEQ ID NO: 422561 - RNA, 32 nt, Homo Sapiens
ugcuuagaaauaacagaagaaaauagaauuga

SEQ ID NO: 422562 - RNA, 32 nt, Homo Sapiens
uuccagaccacuuuuccuagaugaauauauuc

SEQ ID NO: 422563 - RNA, 32 nt, Homo Sapiens
cugcuuuuguuguuuauuuuaaucagcagagc

SEQ ID NO: 422564 - RNA, 32 nt, Homo Sapiens
cgagcggagugggacucgaggcccuguagccg

SEQ ID NO: 422565 - RNA, 32 nt, Homo Sapiens
uguuccuguccacagcuucccuuuaugcugag

SEQ ID NO: 422566 - RNA, 32 nt, Homo Sapiens
cccgcugcgccccucgccccagcgccccaccu

SEQ ID NO: 422567 - RNA, 32 nt, Homo Sapiens
ugcauuuuuuaaaaacuagacauuguggcuug

SEQ ID NO: 422568 - RNA, 32 nt, Homo Sapiens
uauucuguauaaauaauuaagauguaaccauu

SEQ ID NO: 422569 - RNA, 32 nt, Homo Sapiens
gcuccugaagcggcgggcgcgcagcgggagug

SEQ ID NO: 422570 - RNA, 32 nt, Homo Sapiens
aaacauauauauacuauuaaaaagguuuacag

SEQ ID NO: 422571 - RNA, 32 nt, Homo Sapiens
auggccagugggacuaguguucccuccaucug

SEQ ID NO: 422572 - RNA, 32 nt, Homo Sapiens
ugaggcccagggugggcaccagccagccaugg

SEQ ID NO: 422573 - RNA, 32 nt, Homo Sapiens
cagcaacccuccuaucaccuccccuccuugcc

SEQ ID NO: 422574 - RNA, 32 nt, Homo Sapiens
cagcacugauggcgagcuuuggguccgcacac

SEQ ID NO: 422575 - RNA, 32 nt, Homo Sapiens
ccacuccaugcuggaggcgccggcgcucgcug

SEQ ID NO: 422576 - RNA, 32 nt, Homo Sapiens
gaaggagugggcaaaacacauaaaaugaauuu

SEQ ID NO: 422577 - RNA, 32 nt, Homo Sapiens
agugguugcccauuuuaguuuuucuuccagug

SEQ ID NO: 422578 - RNA, 32 nt, Homo Sapiens
guuacuaacgcagcuuuaaaaaaugcauaaac

SEQ ID NO: 422579 - RNA, 32 nt, Homo Sapiens
ccaucuuggacucuccuccccagguuugaaag

SEQ ID NO: 422580 - RNA, 32 nt, Homo Sapiens
uuccuggaucccuggggugggaugcccagugu

SEQ ID NO: 422581 - RNA, 32 nt, Homo Sapiens
cguggguugaauugugucccccauaaaagaua

SEQ ID NO: 422582 - RNA, 32 nt, Homo Sapiens
caagauauugaauaauuuagcuuuaaaaaauc

SEQ ID NO: 422583 - RNA, 32 nt, Homo Sapiens
ucgggcaguccaauaacuuuuuugcaauaaug

SEQ ID NO: 422584 - RNA, 32 nt, Homo Sapiens
guuggggauuuugccuuauuaaggaaaacuug

SEQ ID NO: 422585 - RNA, 32 nt, Homo Sapiens
ugucucuuuuuuccuuuccuuuugacauugga

SEQ ID NO: 422586 - RNA, 32 nt, Homo Sapiens
gauaggauuuauucucuccacacuucugaacc

SEQ ID NO: 422587 - RNA, 32 nt, Homo Sapiens
ggggacacuguaugacucuccucuccugcagg

SEQ ID NO: 422588 - RNA, 32 nt, Homo Sapiens
ggaggaggagugccaggcaggggcugccgaga

SEQ ID NO: 422589 - RNA, 32 nt, Homo Sapiens
auuuugagacugagucuugcucuaucacccag

SEQ ID NO: 422590 - RNA, 32 nt, Homo Sapiens
gagugcuccuuccucaucuaccucagugaggu

SEQ ID NO: 422591 - RNA, 32 nt, Homo Sapiens
ucauugagaaaguucaaaauggaauaggcuuu

SEQ ID NO: 422592 - RNA, 32 nt, Homo Sapiens
gcauguuuuccguacuuucagaauagagugcc

SEQ ID NO: 422593 - RNA, 32 nt, Homo Sapiens
ucccagguucaacagacaucccugccccaggg

SEQ ID NO: 422594 - RNA, 32 nt, Homo Sapiens
cagugacaaccugaaagauacauucuacagca

SEQ ID NO: 422595 - RNA, 32 nt, Homo Sapiens
aagagggaaaauuaaacaauuaaaugaaacaa

SEQ ID NO: 422596 - RNA, 32 nt, Homo Sapiens
guuccccccuccccccaccuuuuuugcuguga

SEQ ID NO: 422597 - RNA, 32 nt, Homo Sapiens
ggcuggaagcugucuucaugccugcugggggc

SEQ ID NO: 422598 - RNA, 32 nt, Homo Sapiens
ggcuaauaaaaacuaagugugagcgucaaaaa

SEQ ID NO: 422599 - RNA, 32 nt, Homo Sapiens
aggcuacuaugcuucaggauugucugguuaaa

SEQ ID NO: 422600 - RNA, 32 nt, Homo Sapiens
uucauuacugaauagauauagccaaauuccuu

SEQ ID NO: 422601 - RNA, 32 nt, Homo Sapiens
gucccgcacuguacugugaagaccucuccagc

SEQ ID NO: 422602 - RNA, 32 nt, Homo Sapiens
caagcccgaauucguagacaucaucaaugcca

SEQ ID NO: 422603 - RNA, 31 nt, Homo Sapiens
gcugcagccugcugccugcccuucauggcuc

SEQ ID NO: 422604 - RNA, 32 nt, Homo Sapiens
aucuguggaaauuuauuaaaauacgaucauuu

SEQ ID NO: 422605 - RNA, 30 nt, Homo Sapiens
ucucuccuuggggugggggaaucccaaagu

SEQ ID NO: 422606 - RNA, 32 nt, Homo Sapiens
cccugggaggcucggacgggguccuggcguug

SEQ ID NO: 422607 - RNA, 32 nt, Homo Sapiens
cauaccaauaaccagcucucuguucugcucug

SEQ ID NO: 422608 - RNA, 32 nt, Homo Sapiens
uauuuagaauccagugguauguuugugguaua

SEQ ID NO: 422609 - RNA, 32 nt, Homo Sapiens
uacaggcgugugccaccacaccuggcuauuuu

SEQ ID NO: 422610 - RNA, 32 nt, Homo Sapiens
ugcgcccgggaccugcauggccaggcagaguc

SEQ ID NO: 422611 - RNA, 32 nt, Homo Sapiens
acgaggaauucgcccacgcaggaggcacggcg

SEQ ID NO: 422612 - RNA, 32 nt, Homo Sapiens
uuuuccccacccagagaauagcccccuucgau

SEQ ID NO: 422613 - RNA, 32 nt, Homo Sapiens
cucauuagcaaaagaguaauuuccaagggugu

SEQ ID NO: 422614 - RNA, 32 nt, Homo Sapiens
gcaggccgugcagaugcuaggcgaggcccucc

SEQ ID NO: 422615 - RNA, 32 nt, Homo Sapiens
guggauguggcgccauagccacagcaacggua

SEQ ID NO: 422616 - RNA, 32 nt, Homo Sapiens
uguuccagauguaacagguuugaaagagcuca

SEQ ID NO: 422617 - RNA, 32 nt, Homo Sapiens
gucccgggccgcggcgcggucgucuuggacgc

SEQ ID NO: 422618 - RNA, 32 nt, Homo Sapiens
acuguaaacaauuauacucaaugguauuugug

SEQ ID NO: 422619 - RNA, 32 nt, Homo Sapiens
gcugguggcaagagagaaucagagcaccaagc

SEQ ID NO: 422620 - RNA, 32 nt, Homo Sapiens
uuccugcuuccaugggccuuucugguggcagu

SEQ ID NO: 422621 - RNA, 32 nt, Homo Sapiens
aaaccccggucuggaacuggcuccuuaccuug

SEQ ID NO: 422622 - RNA, 32 nt, Homo Sapiens
cuucccugcuccaugcccagaguauagcuaga

SEQ ID NO: 422623 - RNA, 32 nt, Homo Sapiens
gcuccgccucuggcgcgaccgacgacuggagc

SEQ ID NO: 422624 - RNA, 32 nt, Homo Sapiens
uccucaaugagcuagacggcacaggggcccug

SEQ ID NO: 422625 - RNA, 27 nt, Homo Sapiens
cccugccuuaauuucagccccccagcu

SEQ ID NO: 422626 - RNA, 32 nt, Homo Sapiens
acaaacaaacaaacaaacauagaaccaucguu

SEQ ID NO: 422627 - RNA, 32 nt, Homo Sapiens
ugagcugggggaugcccuggaacucagagcac

SEQ ID NO: 422628 - RNA, 32 nt, Homo Sapiens
ucuuucaugucuuuaagcuaaguaaguguuca

SEQ ID NO: 422629 - RNA, 32 nt, Homo Sapiens
agccauacugcccagugucccggagcucaaag

SEQ ID NO: 422630 - RNA, 32 nt, Homo Sapiens
ccggcgaagaucuggagcgguaaggcggagag

SEQ ID NO: 422631 - RNA, 32 nt, Homo Sapiens
auuagaugcagguguuaacauguaucaccacu

SEQ ID NO: 422632 - RNA, 32 nt, Homo Sapiens
cccuugccggugaaggaugcggcaggugcucu

SEQ ID NO: 422633 - RNA, 32 nt, Homo Sapiens
cccucgucaccauccuguccuuggcuggccgu

SEQ ID NO: 422634 - RNA, 32 nt, Homo Sapiens
auguggagauuuucaaauugcaaccauauaaa

SEQ ID NO: 422635 - RNA, 32 nt, Homo Sapiens
ccaagugagagcuggugagaccacgugcugcu

SEQ ID NO: 422636 - RNA, 32 nt, Homo Sapiens
accugcuuguugcaagagaacaucagugauuu

SEQ ID NO: 422637 - RNA, 32 nt, Homo Sapiens
ugcuggccuccaugggaugcuguuagaacaau

SEQ ID NO: 422638 - RNA, 32 nt, Homo Sapiens
agcuaggacccggcugcugugcacugggacug

SEQ ID NO: 422639 - RNA, 32 nt, Homo Sapiens
gccucuccccacuccccuugccccacacccuu

SEQ ID NO: 422640 - RNA, 32 nt, Homo Sapiens
gguuuuucauauuuaaauguuucaauuucugu

SEQ ID NO: 422641 - RNA, 32 nt, Homo Sapiens
cggaggaggucuggaaggagggggcgggcagg

SEQ ID NO: 422642 - RNA, 32 nt, Homo Sapiens
cacuugggguaaacacuauccaugcauuacuu

SEQ ID NO: 422643 - RNA, 32 nt, Homo Sapiens
uggaauccagcauccccuaugaucuagguagc

SEQ ID NO: 422644 - RNA, 32 nt, Homo Sapiens
guuccugggacacuuaaccaaugccuucuggu

SEQ ID NO: 422645 - RNA, 32 nt, Homo Sapiens
ggcggcggcggaagagggcggaggguaguggg

SEQ ID NO: 422646 - RNA, 32 nt, Homo Sapiens
uuccuuuaaauauauauggcauuauacaucca

SEQ ID NO: 422647 - RNA, 32 nt, Homo Sapiens
caccaacaggagauauugaggauauuuagagu

SEQ ID NO: 422648 - RNA, 32 nt, Homo Sapiens
aaggagcagcauagugaaauccuggcaccccu

SEQ ID NO: 422649 - RNA, 32 nt, Homo Sapiens
uuuucuguagaauacuuugccucgauauauaa

SEQ ID NO: 422650 - RNA, 32 nt, Homo Sapiens
uuacucccccgcaugagguaugggcuguucua

SEQ ID NO: 422651 - RNA, 32 nt, Homo Sapiens
cucuaaaaucauaucagauuuuuuaaaauccu

SEQ ID NO: 422652 - RNA, 32 nt, Homo Sapiens
cgagcacgcguugcugcuggacgcugcuggcc

SEQ ID NO: 422653 - RNA, 32 nt, Homo Sapiens
cccagagcacugggcaaucguuacgaccugua

SEQ ID NO: 422654 - RNA, 32 nt, Homo Sapiens
aggcugggguucuuuccauuauagaggagacg

SEQ ID NO: 422655 - RNA, 32 nt, Homo Sapiens
cccccuagaaaauuauacuauugagaaaucua

SEQ ID NO: 422656 - RNA, 32 nt, Homo Sapiens
gcacuugggggacugggcgcaguuggucuuua

SEQ ID NO: 422657 - RNA, 32 nt, Homo Sapiens
gaacccuggugccuccuacccuauggcccuga

SEQ ID NO: 422658 - RNA, 32 nt, Homo Sapiens
auuaucuauggaaaugugagaaaugucuaaua

SEQ ID NO: 422659 - RNA, 32 nt, Homo Sapiens
cuuaugaauuguuaugcgaauuuuauauauuu

SEQ ID NO: 422660 - RNA, 32 nt, Homo Sapiens
uauuguacaaaguguauauaauuacuguuuuc

SEQ ID NO: 422661 - RNA, 32 nt, Homo Sapiens
cuggauccgcggcugcccgaucguuggcggga

SEQ ID NO: 422662 - RNA, 32 nt, Homo Sapiens
ugaucuccaguucuuggaggguuccggugaga

SEQ ID NO: 422663 - RNA, 32 nt, Homo Sapiens
aauuggagauccaguuuuagaagugcuuucug

SEQ ID NO: 422664 - RNA, 32 nt, Homo Sapiens
gcagugugauguaaucaaaaacaaagaagccc

SEQ ID NO: 422665 - RNA, 32 nt, Homo Sapiens
ugcucuauaaagaacaaggcuuugaaacauug

SEQ ID NO: 422666 - RNA, 32 nt, Homo Sapiens
cucacugagcacuggccauagccccgggaggg

SEQ ID NO: 422667 - RNA, 32 nt, Homo Sapiens
uuuaaccuuucugccaauccagaggcaagcac

SEQ ID NO: 422668 - RNA, 32 nt, Homo Sapiens
cccugcccuggcccccagaguccccuucuuuc

SEQ ID NO: 422669 - RNA, 32 nt, Homo Sapiens
aagaggauggugguuugcaccuguuccugaag

SEQ ID NO: 422670 - RNA, 31 nt, Homo Sapiens
uucauccaagaguacuucugaguuauuauca

SEQ ID NO: 422671 - RNA, 32 nt, Homo Sapiens
ugguggaggggcagacccccuacaaggccuga

SEQ ID NO: 422672 - RNA, 32 nt, Homo Sapiens
caggagccaaggagguccugcugcuggcccgg

SEQ ID NO: 422673 - RNA, 32 nt, Homo Sapiens
ggcugggagaggaaaauccaucugaacucacc

SEQ ID NO: 422674 - RNA, 32 nt, Homo Sapiens
uguauacacacagacaucuacacugacauacc

SEQ ID NO: 422675 - RNA, 32 nt, Homo Sapiens
gggugaaggugggacgggaggcgggagggggc

SEQ ID NO: 422676 - RNA, 32 nt, Homo Sapiens
uuuuauucucauuacuucucuuucaguggcuu

SEQ ID NO: 422677 - RNA, 32 nt, Homo Sapiens
gaauguuccuggauguucauaucuaguguuug

SEQ ID NO: 422678 - RNA, 32 nt, Homo Sapiens
gagaugaggaaauaaggcuuuuagacaguuug

SEQ ID NO: 422679 - RNA, 32 nt, Homo Sapiens
gggcuucguguuccugggugcugaccgugcac

SEQ ID NO: 422680 - RNA, 32 nt, Homo Sapiens
agaaccaaagcugcuucgcugcucuccaggga

SEQ ID NO: 422681 - RNA, 32 nt, Homo Sapiens
aggcaucuaaagauauaagugauuaacuucuu

SEQ ID NO: 422682 - RNA, 32 nt, Homo Sapiens
guaccagagaauaaaugucuauguagucauac

SEQ ID NO: 422683 - RNA, 32 nt, Homo Sapiens
ugugugcuuacuuuuugcuagauguuucauaa

SEQ ID NO: 422684 - RNA, 32 nt, Homo Sapiens
acagucugggucccacacugugucucagugag

SEQ ID NO: 422685 - RNA, 32 nt, Homo Sapiens
auuacuugcauaauuguucuuuuaaaauuauu

SEQ ID NO: 422686 - RNA, 32 nt, Homo Sapiens
ggccugcugcgcagacguccaucacguuagcu

SEQ ID NO: 422687 - RNA, 32 nt, Homo Sapiens
ugcuugcuaccuugugaauucuuccuuagaca

SEQ ID NO: 422688 - RNA, 32 nt, Homo Sapiens
uguucacugguuuuauuuuaaauugccuucuu

SEQ ID NO: 422689 - RNA, 32 nt, Homo Sapiens
ggcccagagacacuguccuuccccucauccac

SEQ ID NO: 422690 - RNA, 32 nt, Homo Sapiens
auuaaaggugccaugaaagguagacucugaac

SEQ ID NO: 422691 - RNA, 32 nt, Homo Sapiens
ggaugggugcgcagcucugcccucccugaggc

SEQ ID NO: 422692 - RNA, 32 nt, Homo Sapiens
guacccaggaccacucuguaccaucuuuguaa

SEQ ID NO: 422693 - RNA, 32 nt, Homo Sapiens
cugagcagggaauccggccggaggaaggagca

SEQ ID NO: 422694 - RNA, 32 nt, Homo Sapiens
uccucgcuucuccucuccuccuccugaccugg

SEQ ID NO: 422695 - RNA, 32 nt, Homo Sapiens
ccgcggugguggcggugcaagagagcugaggg

SEQ ID NO: 422696 - RNA, 32 nt, Homo Sapiens
uuuuucacagaaauagaaaagcaauccuaaaa

SEQ ID NO: 422697 - RNA, 32 nt, Homo Sapiens
cuggccccuuccgcaaucuccucccccagucu

SEQ ID NO: 422698 - RNA, 32 nt, Homo Sapiens
uggaucuccgcuaaucccacccggugaugaua

SEQ ID NO: 422699 - RNA, 32 nt, Homo Sapiens
ucuugaacccccccuuuuuuucuggcucaugu

SEQ ID NO: 422700 - RNA, 32 nt, Homo Sapiens
aguccuggccccagcucuguguagccauguga

SEQ ID NO: 422701 - RNA, 32 nt, Homo Sapiens
gugauuauucuauuuuguaacuuccaauguac

SEQ ID NO: 422702 - RNA, 32 nt, Homo Sapiens
gguuuugccauguuggucaggcuggucucaaa

SEQ ID NO: 422703 - RNA, 32 nt, Homo Sapiens
ucuugguucugccugcagccugccuggcuccg

SEQ ID NO: 422704 - RNA, 32 nt, Homo Sapiens
gguugcuauuuuccuucuuuagucaauaugac

SEQ ID NO: 422705 - RNA, 32 nt, Homo Sapiens
gcuggggccaccaggagaagggaccagcaccu

SEQ ID NO: 422706 - RNA, 32 nt, Homo Sapiens
auaguggcauagaaaaaguauaaagcucaguu

SEQ ID NO: 422707 - RNA, 32 nt, Homo Sapiens
gagguguaauuuauuuacaauaaaauguuccu

SEQ ID NO: 422708 - RNA, 32 nt, Homo Sapiens
uuuucacuuaggaugcugucauugaagaauuu

SEQ ID NO: 422709 - RNA, 32 nt, Homo Sapiens
uuggaguagaucaaucaccuucugcugcuugg

SEQ ID NO: 422710 - RNA, 32 nt, Homo Sapiens
guugcuggguggcaaugcccguccucuggcuu

SEQ ID NO: 422711 - RNA, 32 nt, Homo Sapiens
uuugaggagcagcuucaguuguuuucccgagc

SEQ ID NO: 422712 - RNA, 32 nt, Homo Sapiens
gaagaggccuggcagagcugccugucuugugu

SEQ ID NO: 422713 - RNA, 32 nt, Homo Sapiens
gugcccuugagagaagcagagggaguggcaug

SEQ ID NO: 422714 - RNA, 32 nt, Homo Sapiens
agaguacccaaauuggauuguauuuuaaugga

SEQ ID NO: 422715 - RNA, 32 nt, Homo Sapiens
cugcaaaagggaacagaagaggccaagucccc

SEQ ID NO: 422716 - RNA, 32 nt, Homo Sapiens
ucccgcccgcacacagcggcgcgcucauccuc

SEQ ID NO: 422717 - RNA, 32 nt, Homo Sapiens
ucugucacuguaagaucuuuguccucuuucuc

SEQ ID NO: 422718 - RNA, 32 nt, Homo Sapiens
gggaucagcuggaagcugccugucaucuccug

SEQ ID NO: 422719 - RNA, 32 nt, Homo Sapiens
acgugcagauauugccuggacacacacaugug

SEQ ID NO: 422720 - RNA, 32 nt, Homo Sapiens
cugcuggggaugucuccuggggacuuugccua

SEQ ID NO: 422721 - RNA, 32 nt, Homo Sapiens
acacugagguugaauucauaucgccugagaug

SEQ ID NO: 422722 - RNA, 32 nt, Homo Sapiens
cgacuuugacauuuagucaauaaagacuuaaa

SEQ ID NO: 422723 - RNA, 32 nt, Homo Sapiens
cugucuccaaagugggccucugcacaaggcug

SEQ ID NO: 422724 - RNA, 32 nt, Homo Sapiens
ucccacuuuuaccuccucuccaagacaaaaca

SEQ ID NO: 422725 - RNA, 32 nt, Homo Sapiens
uuggaaccaacccaaaugcccaucaaugauag

SEQ ID NO: 422726 - RNA, 32 nt, Homo Sapiens
cucuggagcugggauuugggaggacacagcag

SEQ ID NO: 422727 - RNA, 32 nt, Homo Sapiens
auagccaaauuucagaauaaauuaaaagaauu

SEQ ID NO: 422728 - RNA, 32 nt, Homo Sapiens
gcugaaggcagacgaugugcuuaagccugagu

SEQ ID NO: 422729 - RNA, 32 nt, Homo Sapiens
gcgcggcggccgcggcugcgacaccccaaccc

SEQ ID NO: 422730 - RNA, 32 nt, Homo Sapiens
cgaacuggccggcugggcgcgcgcucuugcgg

SEQ ID NO: 422731 - RNA, 32 nt, Homo Sapiens
agacuuccuugcaggagugacucaagaauuaa

SEQ ID NO: 422732 - RNA, 32 nt, Homo Sapiens
agguuaugucauuuuauaaagacuucauugau

SEQ ID NO: 422733 - RNA, 32 nt, Homo Sapiens
gaccuucuuccacagcaaaugagauguaugcc

SEQ ID NO: 422734 - RNA, 32 nt, Homo Sapiens
ugacaaugaagauacgaaacuggacaucaggg

SEQ ID NO: 422735 - RNA, 31 nt, Homo Sapiens
aaaaacugaggucuuuuuaaucuugauuaca

SEQ ID NO: 422736 - RNA, 32 nt, Homo Sapiens
guuucauucuugcgguagguagaauaaugccc

SEQ ID NO: 422737 - RNA, 32 nt, Homo Sapiens
uaacuacaaauuuuauuuauuguuaugaaacu

SEQ ID NO: 422738 - RNA, 31 nt, Homo Sapiens
uggcacugcagcaguaccuggcaugugggag

SEQ ID NO: 422739 - RNA, 32 nt, Homo Sapiens
gagcugcuugcucugcagaucauuccuuugag

SEQ ID NO: 422740 - RNA, 32 nt, Homo Sapiens
guggagcgacaauagcuaagugaggccugcuu

SEQ ID NO: 422741 - RNA, 32 nt, Homo Sapiens
uguuuccauuuucuucaucucgaaggugaggg

SEQ ID NO: 422742 - RNA, 32 nt, Homo Sapiens
aaggcugacccggcccgggcugcguacacccu

SEQ ID NO: 422743 - RNA, 32 nt, Homo Sapiens
ucuuggaccccaggcagcugguguggagcccc

SEQ ID NO: 422744 - RNA, 32 nt, Homo Sapiens
ccucuggguaccugguggauagcugccuucuc

SEQ ID NO: 422745 - RNA, 32 nt, Homo Sapiens
ggaaaagcacuucugcucuaccggcauuaaga

SEQ ID NO: 422746 - RNA, 32 nt, Homo Sapiens
uccaacccaaaauaucauuaguccugagguug

SEQ ID NO: 422747 - RNA, 32 nt, Homo Sapiens
ggacaugaaaagacacagcgcuaagguuuccu

SEQ ID NO: 422748 - RNA, 32 nt, Homo Sapiens
gcucucacagaaagcuuaaucauagauauaau

SEQ ID NO: 422749 - RNA, 32 nt, Homo Sapiens
guauauaaaaauuccuuguaauggucaaauau

SEQ ID NO: 422750 - RNA, 30 nt, Homo Sapiens
cagauucucgguggcggcggcagcggcggc

SEQ ID NO: 422751 - RNA, 32 nt, Homo Sapiens
ccggcccaccuggcugcccaucugcggccuuu

SEQ ID NO: 422752 - RNA, 32 nt, Homo Sapiens
aaaucccucucccccaggagcccugcugcuuu

SEQ ID NO: 422753 - RNA, 32 nt, Homo Sapiens
aggggagggucucuguaggugggagagggccu

SEQ ID NO: 422754 - RNA, 32 nt, Homo Sapiens
ucuuggugcuguugaaaauaauccauuuucac

SEQ ID NO: 422755 - RNA, 32 nt, Homo Sapiens
agcauagguuuuucauauaaaaauauucugaa

SEQ ID NO: 422756 - RNA, 32 nt, Homo Sapiens
gaacggggugggggcugcuguagauagacccu

SEQ ID NO: 422757 - RNA, 32 nt, Homo Sapiens
aucucagacauaauccaccaugcugaaucaga

SEQ ID NO: 422758 - RNA, 28 nt, Homo Sapiens
agcauggucauggcggauggcccgaggc

SEQ ID NO: 422759 - RNA, 32 nt, Homo Sapiens
cauagaacugucaucugacccaguuauuccac

SEQ ID NO: 422760 - RNA, 32 nt, Homo Sapiens
uguucuuugucuggugagacaccuuaccucaa

SEQ ID NO: 422761 - RNA, 32 nt, Homo Sapiens
gcuggggauggagaguaccgggccccucacug

SEQ ID NO: 422762 - RNA, 32 nt, Homo Sapiens
aauuguguagcucugugauucuuccaggggca

SEQ ID NO: 422763 - RNA, 32 nt, Homo Sapiens
aauauugggaugcaugagaucccaugaucuug

SEQ ID NO: 422764 - RNA, 32 nt, Homo Sapiens
ggggaguggggcgggggagcgagguggcgccg

SEQ ID NO: 422765 - RNA, 32 nt, Homo Sapiens
cugcgccucacaggggucgcuggcguuggagc

SEQ ID NO: 422766 - RNA, 32 nt, Homo Sapiens
agggcugagagcugcgcuuuggggacuucagc

SEQ ID NO: 422767 - RNA, 32 nt, Homo Sapiens
ggugacccuucccacacaccagccacagauag

SEQ ID NO: 422768 - RNA, 32 nt, Homo Sapiens
ggccggacguccucggggugggcccccagucg

SEQ ID NO: 422769 - RNA, 32 nt, Homo Sapiens
uggcauugcuacuucaacaucgucuuccaugu

SEQ ID NO: 422770 - RNA, 32 nt, Homo Sapiens
aauguaaaacauugccaucuucucacaaaucu

SEQ ID NO: 422771 - RNA, 32 nt, Homo Sapiens
cuggaguugugcgcaugcuugcuugaggcauu

SEQ ID NO: 422772 - RNA, 32 nt, Homo Sapiens
cugucuguucuaaagcgaaccagccacuuuuu

SEQ ID NO: 422773 - RNA, 32 nt, Homo Sapiens
agagcagguggaagaggaccuugcaggugccu

SEQ ID NO: 422774 - RNA, 32 nt, Homo Sapiens
guccacucccugccugccugcccgcaucucag

SEQ ID NO: 422775 - RNA, 32 nt, Homo Sapiens
acuugaaugcccaaaauuuucauaguucuaua

SEQ ID NO: 422776 - RNA, 32 nt, Homo Sapiens
augaaaaaagcaagccacaauaccaugauucc

SEQ ID NO: 422777 - RNA, 32 nt, Homo Sapiens
aauguaaagugcuuuuucucuuuuaaaaguau

SEQ ID NO: 422778 - RNA, 32 nt, Homo Sapiens
ggcucuaagcgcucagcuccgcggucguccuc

SEQ ID NO: 422779 - RNA, 32 nt, Homo Sapiens
ccguguccuugucuccccuccucccccaucug

SEQ ID NO: 422780 - RNA, 32 nt, Homo Sapiens
gagggagaaaggcccgagccccugccuucccg

SEQ ID NO: 422781 - RNA, 32 nt, Homo Sapiens
cagccgggcuggggcugcuggggaagcccugu

SEQ ID NO: 422782 - RNA, 32 nt, Homo Sapiens
gauaauguuucuucuuuuuaaugguaaauauu

SEQ ID NO: 422783 - RNA, 32 nt, Homo Sapiens
uagacauuuuucauacacuuaauaguacugua

SEQ ID NO: 422784 - RNA, 32 nt, Homo Sapiens
auuuacauauauaugcacauguauauauaguu

SEQ ID NO: 422785 - RNA, 32 nt, Homo Sapiens
guggugcugaugcugccaaaaauguacucgau

SEQ ID NO: 422786 - RNA, 32 nt, Homo Sapiens
uugauucccacccucccuccccaguuacuuaa

SEQ ID NO: 422787 - RNA, 32 nt, Homo Sapiens
aucuuggaucauuuuuauguagcaugauuuuc

SEQ ID NO: 422788 - RNA, 32 nt, Homo Sapiens
acuagcauaucugccuuuauuguguuugucau

SEQ ID NO: 422789 - RNA, 32 nt, Homo Sapiens
agacugggcugcgggcggcggggccggcgccu

SEQ ID NO: 422790 - RNA, 32 nt, Homo Sapiens
ugcuuaaaugcuucaucacagucacauucaaa

SEQ ID NO: 422791 - RNA, 32 nt, Homo Sapiens
gacgguugguugugugucugugcucgugggga

SEQ ID NO: 422792 - RNA, 32 nt, Homo Sapiens
aguaucacauucacaggaugaauuaagaauug

SEQ ID NO: 422793 - RNA, 32 nt, Homo Sapiens
gcgacuacgacggcguugauaucggugguaac

SEQ ID NO: 422794 - RNA, 32 nt, Homo Sapiens
uuugaggguaccuuuugcugcaguugugaaua

SEQ ID NO: 422795 - RNA, 31 nt, Homo Sapiens
uggauguugcacugccccacugccugucccu

SEQ ID NO: 422796 - RNA, 32 nt, Homo Sapiens
cgaggccgcgguuucccccugggccuccccag

SEQ ID NO: 422797 - RNA, 32 nt, Homo Sapiens
uuaauuauauauuaccuaacuaguauuaaaug

SEQ ID NO: 422798 - RNA, 32 nt, Homo Sapiens
caaagauagauagauagcauguaaauuggguu

SEQ ID NO: 422799 - RNA, 32 nt, Homo Sapiens
gccuguucugugugugccgccgggcgacgugc

SEQ ID NO: 422800 - RNA, 32 nt, Homo Sapiens
agucccccucccagcacccccagccauccccc

SEQ ID NO: 422801 - RNA, 32 nt, Homo Sapiens
cuucuaguuucacguaaauauucauauuaggu

SEQ ID NO: 422802 - RNA, 32 nt, Homo Sapiens
uucccuuaauuccuccucccgaccuuuuuuac

SEQ ID NO: 422803 - RNA, 32 nt, Homo Sapiens
gucauaccacacgacacgggaguuuaguacaa

SEQ ID NO: 422804 - RNA, 31 nt, Homo Sapiens
gauccccucaaugaaguucauaacuuuaacu

SEQ ID NO: 422805 - RNA, 32 nt, Homo Sapiens
auugcuacaucauaguugauaaauugauguua

SEQ ID NO: 422806 - RNA, 32 nt, Homo Sapiens
acccaggaucauuguucaaguucuuaugcaga

SEQ ID NO: 422807 - RNA, 32 nt, Homo Sapiens
cccgcgcgcuggcgcggggcuuucugggccag

SEQ ID NO: 422808 - RNA, 32 nt, Homo Sapiens
uccggaacaccaccuccaccgggcugcaguuc

SEQ ID NO: 422809 - RNA, 30 nt, Homo Sapiens
agacaugucugugaaccuggggcucuuggg

SEQ ID NO: 422810 - RNA, 32 nt, Homo Sapiens
agcuggaugcgguggcucacgccuguaauccc

SEQ ID NO: 422811 - RNA, 32 nt, Homo Sapiens
cagaguccugaacaucccuccuuucaggcugc

SEQ ID NO: 422812 - RNA, 32 nt, Homo Sapiens
gccuaggcggguggaucacgacgucaggaaau

SEQ ID NO: 422813 - RNA, 32 nt, Homo Sapiens
uuuucuguauaaaugucuuuaaugcaauauac

SEQ ID NO: 422814 - RNA, 32 nt, Homo Sapiens
cacaauaaucuaaauguuuaaggaacugguuu

SEQ ID NO: 422815 - RNA, 32 nt, Homo Sapiens
gucguugacaguuuuauuuacugguuucuuug

SEQ ID NO: 422816 - RNA, 32 nt, Homo Sapiens
uaauaagucugcugaauaacaagagugaggag

SEQ ID NO: 422817 - RNA, 32 nt, Homo Sapiens
ugaguccagaucugaguuuuuccucggagauu

SEQ ID NO: 422818 - RNA, 32 nt, Homo Sapiens
cuccgcccuuggggcccucccgccgggccgga

SEQ ID NO: 422819 - RNA, 32 nt, Homo Sapiens
gaggggcagagcucguccagggucaccaaacc

SEQ ID NO: 422820 - RNA, 32 nt, Homo Sapiens
uguggcagggcugcccgugccuaugaagcaug

SEQ ID NO: 422821 - RNA, 32 nt, Homo Sapiens
auuuugaacaaagaauuggacaaaacacacaa

SEQ ID NO: 422822 - RNA, 32 nt, Homo Sapiens
uggcaugcgggaagcagccgcggggagguaau

SEQ ID NO: 422823 - RNA, 32 nt, Homo Sapiens
uauuuaaagagauaccagacuucauguugcca

SEQ ID NO: 422824 - RNA, 32 nt, Homo Sapiens
uggguccugacuuuuccauugacuaagcucug

SEQ ID NO: 422825 - RNA, 32 nt, Homo Sapiens
gcgucuguaaaauuccaucucauuucauugcu

SEQ ID NO: 422826 - RNA, 32 nt, Homo Sapiens
cgcaggccaagcccaacaacgccggcccuacc

SEQ ID NO: 422827 - RNA, 32 nt, Homo Sapiens
aagcuguuauaaaguauaaaauuaagauauaa

SEQ ID NO: 422828 - RNA, 32 nt, Homo Sapiens
uguucagcuuaccugccacagagcuuuucugc

SEQ ID NO: 422829 - RNA, 31 nt, Homo Sapiens
aauccagugggccccaaccaaggagacagac

SEQ ID NO: 422830 - RNA, 32 nt, Homo Sapiens
agcuuguuguuauaaauuaaaaguuuacauau

SEQ ID NO: 422831 - RNA, 32 nt, Homo Sapiens
gccgccgcugagggaggcgccccaccaugccg

SEQ ID NO: 422832 - RNA, 32 nt, Homo Sapiens
acuggccuuucuguuccuuggacaugccugga

SEQ ID NO: 422833 - RNA, 32 nt, Homo Sapiens
acauacuucuaaagaacacaauuuuauauaau

SEQ ID NO: 422834 - RNA, 32 nt, Homo Sapiens
cuaaggucaggaguuugagaccagccugagca

SEQ ID NO: 422835 - RNA, 32 nt, Homo Sapiens
ugaaauuauuaaggcauguaauacauuaauga

SEQ ID NO: 422836 - RNA, 32 nt, Homo Sapiens
ccuuccaauuuaauucugcuuucugccagcca

SEQ ID NO: 422837 - RNA, 32 nt, Homo Sapiens
auucacauuuacucuagaaccuuuaacaagca

SEQ ID NO: 422838 - RNA, 32 nt, Homo Sapiens
aacccugugaugaucacccaagccccaggcug

SEQ ID NO: 422839 - RNA, 32 nt, Homo Sapiens
gaguuacagcuuagugaugauuuuaagacaaa

SEQ ID NO: 422840 - RNA, 32 nt, Homo Sapiens
cuaauacaaaaauauauuugacauuuauaagu

SEQ ID NO: 422841 - RNA, 27 nt, Homo Sapiens
acagacaccuucuucuacuccuacuuc

SEQ ID NO: 422842 - RNA, 32 nt, Homo Sapiens
cuuuaaagcccauuuucaccauuuauugauuu

SEQ ID NO: 422843 - RNA, 32 nt, Homo Sapiens
ucugccacagccauagagaggcccucgggcag

SEQ ID NO: 422844 - RNA, 32 nt, Homo Sapiens
gggggucgcaccugcuccugcaugaagaggca

SEQ ID NO: 422845 - RNA, 32 nt, Homo Sapiens
aaccccaauguuauguuaugcuuuguaaauuu

SEQ ID NO: 422846 - RNA, 32 nt, Homo Sapiens
aaggaccagaaaggagaaaugacaugcucaag

SEQ ID NO: 422847 - RNA, 32 nt, Homo Sapiens
cguggcgugcaggacucggguggcucugaggu

SEQ ID NO: 422848 - RNA, 32 nt, Homo Sapiens
caugaccuggaaaggucuaucugcacagccca

SEQ ID NO: 422849 - RNA, 32 nt, Homo Sapiens
acugugagcguguguuuuuuuaauuuacacua

SEQ ID NO: 422850 - RNA, 32 nt, Homo Sapiens
cauuauguucuggugcucauguuuccuggauu

SEQ ID NO: 422851 - RNA, 32 nt, Homo Sapiens
uggaccuuccccagccccugggcccuguccaa

SEQ ID NO: 422852 - RNA, 32 nt, Homo Sapiens
caagaaaaauuugaaaguagcaaaauagaaaa

SEQ ID NO: 422853 - RNA, 32 nt, Homo Sapiens
cagaacuuuucugcccucugguguuaaaagaa

SEQ ID NO: 422854 - RNA, 32 nt, Homo Sapiens
aggugagggaggucacuugggguguggcccag

SEQ ID NO: 422855 - RNA, 32 nt, Homo Sapiens
uagaauuucaccuuacccgacccaggcacuuc

SEQ ID NO: 422856 - RNA, 32 nt, Homo Sapiens
uuucuggaccucuggcaaagggaguggucagu

SEQ ID NO: 422857 - RNA, 32 nt, Homo Sapiens
agaggacccaccccaccagccaugggcccacg

SEQ ID NO: 422858 - RNA, 32 nt, Homo Sapiens
cuugauccacugaaagagauucaacugugugg

SEQ ID NO: 422859 - RNA, 32 nt, Homo Sapiens
aaauugauauuuuuauacaaguaauuuccuga

SEQ ID NO: 422860 - RNA, 32 nt, Homo Sapiens
uugcuggcagguucugccuccucucugauucu

SEQ ID NO: 422861 - RNA, 32 nt, Homo Sapiens
uugcaggucaaaggggcguuuuaaagcagcug

SEQ ID NO: 422862 - RNA, 32 nt, Homo Sapiens
agugaauaaaaaaauuaguuugaaagauaucu

SEQ ID NO: 422863 - RNA, 32 nt, Homo Sapiens
gcgagccccgcugcgccgcgcccuguccccug

SEQ ID NO: 422864 - RNA, 32 nt, Homo Sapiens
caucacauuuuuguuuuuguuuugggaggaaa

SEQ ID NO: 422865 - RNA, 31 nt, Homo Sapiens
agaugccagcagugccugcccguguccccau

SEQ ID NO: 422866 - RNA, 32 nt, Homo Sapiens
ucuauuacagaaaauaguauacacuagacauc

SEQ ID NO: 422867 - RNA, 32 nt, Homo Sapiens
gggauaaccuugcuguuugucuauuuugcagu

SEQ ID NO: 422868 - RNA, 32 nt, Homo Sapiens
ugguuccuuuucuccuuucuuuccuccuugaa

SEQ ID NO: 422869 - RNA, 32 nt, Homo Sapiens
ugcuucuuccacuuauacuuagucucugugcu

SEQ ID NO: 422870 - RNA, 32 nt, Homo Sapiens
aaguuaccauauuuuccaaauauuacauggua

SEQ ID NO: 422871 - RNA, 32 nt, Homo Sapiens
auuccauauaaaagacauuguaauggagugga

SEQ ID NO: 422872 - RNA, 32 nt, Homo Sapiens
gcugcaggguuaggggguauagauaagaggag

SEQ ID NO: 422873 - RNA, 32 nt, Homo Sapiens
uuguuuacaaauagguaaauuauacauuugua

SEQ ID NO: 422874 - RNA, 32 nt, Homo Sapiens
guuaagggaaagccugaaaguaccuuaauaau

SEQ ID NO: 422875 - RNA, 32 nt, Homo Sapiens
guaucugcuuccugucuggggugugagcugca

SEQ ID NO: 422876 - RNA, 32 nt, Homo Sapiens
ucgggguaaccaaauccaccaagauaauagac

SEQ ID NO: 422877 - RNA, 32 nt, Homo Sapiens
uguuucuagagcaucuugguuucuggugcguu

SEQ ID NO: 422878 - RNA, 32 nt, Homo Sapiens
gccuggaucugcgucccgacguagcuggcgcc

SEQ ID NO: 422879 - RNA, 32 nt, Homo Sapiens
cagagcagcuggaaggcagggccgcaucccag

SEQ ID NO: 422880 - RNA, 32 nt, Homo Sapiens
uagaauguauucagcuguuuaacauguaguuu

SEQ ID NO: 422881 - RNA, 32 nt, Homo Sapiens
uuuuucuguuugcggcccaggaagcaguggga

SEQ ID NO: 422882 - RNA, 32 nt, Homo Sapiens
guuccgugccucccugcccccaucgucacuac

SEQ ID NO: 422883 - RNA, 32 nt, Homo Sapiens
gcuuucuuauuucuuaacuucucuggguauuu

SEQ ID NO: 422884 - RNA, 32 nt, Homo Sapiens
aguugggguauuuagagccuguaaucuaaaug

SEQ ID NO: 422885 - RNA, 32 nt, Homo Sapiens
aguugugaaugaugguaaauuuuuuggcauca

SEQ ID NO: 422886 - RNA, 32 nt, Homo Sapiens
gggcaggcaguggcaggggcucccucaggccc

SEQ ID NO: 422887 - RNA, 32 nt, Homo Sapiens
caguccauuuagagauaaugggcuuuguuagc

SEQ ID NO: 422888 - RNA, 32 nt, Homo Sapiens
gcauugccugaagaaguuuggaggcugagagc

SEQ ID NO: 422889 - RNA, 32 nt, Homo Sapiens
cccagaggguccuggggggcggggaggagcca

SEQ ID NO: 422890 - RNA, 32 nt, Homo Sapiens
ccagucuuuuucuggaggaagagcaaucaagu

SEQ ID NO: 422891 - RNA, 32 nt, Homo Sapiens
cugcccggcccggcccucccuggcaaucccug

SEQ ID NO: 422892 - RNA, 32 nt, Homo Sapiens
uccaucuccagguuucaagugauucuccugcc

SEQ ID NO: 422893 - RNA, 32 nt, Homo Sapiens
cagggccugccaguugucccaggccuuggucu

SEQ ID NO: 422894 - RNA, 32 nt, Homo Sapiens
acugauguuccuggugaaggugucacaacaug

SEQ ID NO: 422895 - RNA, 32 nt, Homo Sapiens
cggaucccgaguccccggaucccggacccauc

SEQ ID NO: 422896 - RNA, 32 nt, Homo Sapiens
gacggggcccugcugugagcugcgugccaggc

SEQ ID NO: 422897 - RNA, 32 nt, Homo Sapiens
uucaacuaacccaagcacuuucuagcaccuuu

SEQ ID NO: 422898 - RNA, 32 nt, Homo Sapiens
cagcugcuccuacaagaaugggcuggugccug

SEQ ID NO: 422899 - RNA, 32 nt, Homo Sapiens
ccauauaaauaaaaaauccuguugcacuagug

SEQ ID NO: 422900 - RNA, 32 nt, Homo Sapiens
cacaaaacauucuaaacacuagugaagccugu

SEQ ID NO: 422901 - RNA, 32 nt, Homo Sapiens
gcuccggccccggcccugagggaagcuccaua

SEQ ID NO: 422902 - RNA, 32 nt, Homo Sapiens
auauuuuuaguaauuugcuuauauguaaaagu

SEQ ID NO: 422903 - RNA, 32 nt, Homo Sapiens
aaacccacgcagccuaggccagagcacuuuac

SEQ ID NO: 422904 - RNA, 32 nt, Homo Sapiens
aaaaaacaaaacaaaacccacgcuccaaaaac

SEQ ID NO: 422905 - RNA, 32 nt, Homo Sapiens
aagagacacccugcaaacuggcacauacgaga

SEQ ID NO: 422906 - RNA, 32 nt, Homo Sapiens
accucuggccuggcccuccccaggggccuccu

SEQ ID NO: 422907 - RNA, 32 nt, Homo Sapiens
ucccugcaacaucuccaccucccaauagucuc

SEQ ID NO: 422908 - RNA, 32 nt, Homo Sapiens
auacuucgaugaugaugaugaugaugaugaug

SEQ ID NO: 422909 - RNA, 31 nt, Homo Sapiens
cuagagaaauaaauguguauugaaacuuuug

SEQ ID NO: 422910 - RNA, 32 nt, Homo Sapiens
ugccuccgccacuggccaccgccccuguccug

SEQ ID NO: 422911 - RNA, 32 nt, Homo Sapiens
ggagucgcuguaaaaccugagauugugagcca

SEQ ID NO: 422912 - RNA, 32 nt, Homo Sapiens
cagcccuugccagcugacgucacagucuaaga

SEQ ID NO: 422913 - RNA, 32 nt, Homo Sapiens
cucccuuuucuuuucugccggguaauggcugc

SEQ ID NO: 422914 - RNA, 32 nt, Homo Sapiens
gacccuugguguuucccuuccucgguggcucu

SEQ ID NO: 422915 - RNA, 32 nt, Homo Sapiens
cacucgccauucuccuacugccuuccagaaug

SEQ ID NO: 422916 - RNA, 32 nt, Homo Sapiens
uguggauuuuuagaaaagacuguguauugguu

SEQ ID NO: 422917 - RNA, 32 nt, Homo Sapiens
aaaauaaugcuguuaaacaggaguugaccuuc

SEQ ID NO: 422918 - RNA, 32 nt, Homo Sapiens
gcaucuaggggaggagugcugauacugggaaa

SEQ ID NO: 422919 - RNA, 32 nt, Homo Sapiens
cguggucagccucuacuauccagcagggcugu

SEQ ID NO: 422920 - RNA, 32 nt, Homo Sapiens
cugaaaggaggucaagcagagaggaauggcug

SEQ ID NO: 422921 - RNA, 32 nt, Homo Sapiens
cuaugccuuguugcaccuauuaacagccauug

SEQ ID NO: 422922 - RNA, 32 nt, Homo Sapiens
cucagaucucaaagcucugcuuguauuuguga

SEQ ID NO: 422923 - RNA, 32 nt, Homo Sapiens
aaccggggaggcagagguugcaguuaagccga

SEQ ID NO: 422924 - RNA, 32 nt, Homo Sapiens
aaauauguucuucuuugucaccaaaaacagaa

SEQ ID NO: 422925 - RNA, 32 nt, Homo Sapiens
cacccuuauuaaggaaauuauaauuaguuacu

SEQ ID NO: 422926 - RNA, 32 nt, Homo Sapiens
guuuggaguauuuuuguaauguaaguaucgga

SEQ ID NO: 422927 - RNA, 32 nt, Homo Sapiens
cugguuaaaugaaugaaagaaaaggagcaaau

SEQ ID NO: 422928 - RNA, 32 nt, Homo Sapiens
gcagcgcggcggcgccggcgucgucccaacuu

SEQ ID NO: 422929 - RNA, 32 nt, Homo Sapiens
ccuuucggcagagcaaggaaccccacuagcca

SEQ ID NO: 422930 - RNA, 32 nt, Homo Sapiens
agcagccccucuauuaaucaccaacuaugcag

SEQ ID NO: 422931 - RNA, 32 nt, Homo Sapiens
ugggauucuaauguuuuauuuucaugcuuauc

SEQ ID NO: 422932 - RNA, 32 nt, Homo Sapiens
agucacugagggugggcugggacucggggccc

SEQ ID NO: 422933 - RNA, 32 nt, Homo Sapiens
aauuauauuaaacauuuauuuugaaaaaaaaa

SEQ ID NO: 422934 - RNA, 32 nt, Homo Sapiens
uuuaugaaauucugggguguuguaugcugcuu

SEQ ID NO: 422935 - RNA, 32 nt, Homo Sapiens
aguccugccucccaggaacccccuccgucuca

SEQ ID NO: 422936 - RNA, 32 nt, Homo Sapiens
ucuauucaguggaaacaauaaucaucucuauu

SEQ ID NO: 422937 - RNA, 32 nt, Homo Sapiens
caugaucucugcaaacaggcacuggguuuuca

SEQ ID NO: 422938 - RNA, 32 nt, Homo Sapiens
uuugaauuugaaacaggagaugaaagacucuc

SEQ ID NO: 422939 - RNA, 32 nt, Homo Sapiens
gcguuggccaucucuacauuuugugaggugag

SEQ ID NO: 422940 - RNA, 32 nt, Homo Sapiens
guccacagauuauuagauggcaugucaaaaaa

SEQ ID NO: 422941 - RNA, 32 nt, Homo Sapiens
aaguaaauuaaaccucuuuaauucaucaauua

SEQ ID NO: 422942 - RNA, 32 nt, Homo Sapiens
ggcacgaggggagcggcugggagguucgcgcg

SEQ ID NO: 422943 - RNA, 32 nt, Homo Sapiens
auuuugguauaaaauguaauuaaugagcaaaa

SEQ ID NO: 422944 - RNA, 32 nt, Homo Sapiens
caaccagcucuguagggagcucugccagaggg

SEQ ID NO: 422945 - RNA, 32 nt, Homo Sapiens
auuaaggaacauuuggagaguuacuacuagcu

SEQ ID NO: 422946 - RNA, 31 nt, Homo Sapiens
gcacggagggcggcgcggaguccuggacgcu

SEQ ID NO: 422947 - RNA, 32 nt, Homo Sapiens
gguuggaggagcuccuagucuguguucccuga

SEQ ID NO: 422948 - RNA, 32 nt, Homo Sapiens
uggagagauuguuucugaaacucugauugcuu

SEQ ID NO: 422949 - RNA, 32 nt, Homo Sapiens
gggacagcccuccugggaaucuacauuguguu

SEQ ID NO: 422950 - RNA, 32 nt, Homo Sapiens
ucucuuuugauucaauuauacugcacauguuu

SEQ ID NO: 422951 - RNA, 32 nt, Homo Sapiens
auaaaacauuaauauaagucguuacuuuuaga

SEQ ID NO: 422952 - RNA, 32 nt, Homo Sapiens
agguucgcagguggagagcggacgcgggggcg

SEQ ID NO: 422953 - RNA, 32 nt, Homo Sapiens
cccuuguuuaaagauaaauguaagcugggugu

SEQ ID NO: 422954 - RNA, 32 nt, Homo Sapiens
aggccuggccuuuagcugcugcccugcccuug

SEQ ID NO: 422955 - RNA, 30 nt, Homo Sapiens
ggccgggcgcccgcggcggcaccaugaguc

SEQ ID NO: 422956 - RNA, 32 nt, Homo Sapiens
auuuuuucucuccaauuuaaccccaagauuuc

SEQ ID NO: 422957 - RNA, 32 nt, Homo Sapiens
uguuuuuccuuccuauggauuugauuaauuuu

SEQ ID NO: 422958 - RNA, 32 nt, Homo Sapiens
aacgaguaccuucuaaagcaccauaugaggaa

SEQ ID NO: 422959 - RNA, 32 nt, Homo Sapiens
cugggcggcuccugguucuggucccggcuggc

SEQ ID NO: 422960 - RNA, 32 nt, Homo Sapiens
gccagaucccucugcuggaaaugcagccccca

SEQ ID NO: 422961 - RNA, 32 nt, Homo Sapiens
ccccucggugccugggcccagccccgugcccc

SEQ ID NO: 422962 - RNA, 32 nt, Homo Sapiens
ccugucccacccccuucccccagcccauccau

SEQ ID NO: 422963 - RNA, 32 nt, Homo Sapiens
gugggucggucccggggaugcagcgcgggggu

SEQ ID NO: 422964 - RNA, 32 nt, Homo Sapiens
cagaggcugggcccugcacauaaagcuuucgu

SEQ ID NO: 422965 - RNA, 32 nt, Homo Sapiens
ccaguaccgagcucgggccugguguggaauuc

SEQ ID NO: 422966 - RNA, 32 nt, Homo Sapiens
ugcacgcugucgcuucccccacagcaaccugc

SEQ ID NO: 422967 - RNA, 32 nt, Homo Sapiens
uguuacagaaguuaagugacuugcucaaggcc

SEQ ID NO: 422968 - RNA, 32 nt, Homo Sapiens
ucuaccaaaaauacaaaaauuagccaggcgug

SEQ ID NO: 422969 - RNA, 32 nt, Homo Sapiens
acugagaaagagagagauacaucuuauaaacu

SEQ ID NO: 422970 - RNA, 32 nt, Homo Sapiens
ggcucucucugcuccgcuccgcgcccagguag

SEQ ID NO: 422971 - RNA, 32 nt, Homo Sapiens
acaaaaaauauuuaaaaaauuagccaggugug

SEQ ID NO: 422972 - RNA, 32 nt, Homo Sapiens
uugucuuguuuuuucuucugcagugaaaauaa

SEQ ID NO: 422973 - RNA, 32 nt, Homo Sapiens
acuaaaccagggguuuucaagcaagaagucag

SEQ ID NO: 422974 - RNA, 32 nt, Homo Sapiens
uuaucuaacaaaauuaauauaaauuccaggac

SEQ ID NO: 422975 - RNA, 32 nt, Homo Sapiens
uucacuuaaaacauucuuaaaaugguuggcuu

SEQ ID NO: 422976 - RNA, 32 nt, Homo Sapiens
uacaggcacgcucuaccacaccuggcuaauuu

SEQ ID NO: 422977 - RNA, 32 nt, Homo Sapiens
uucuaacuaugaauaugagaacuucuaggaaa

SEQ ID NO: 422978 - RNA, 32 nt, Homo Sapiens
auggugguuacccaugaggaaauauuuaucau

SEQ ID NO: 422979 - RNA, 32 nt, Homo Sapiens
gccuggacgagagcauccuccucuauggacaa

SEQ ID NO: 422980 - RNA, 32 nt, Homo Sapiens
ccuggcuaagucggucucuaauaaaaauacaa

SEQ ID NO: 422981 - RNA, 32 nt, Homo Sapiens
uuuuuauuuuuccucuuuucauaaaugcucuu

SEQ ID NO: 422982 - RNA, 32 nt, Homo Sapiens
agaccugcucuccuuccuuccuccccugccac

SEQ ID NO: 422983 - RNA, 32 nt, Homo Sapiens
cccccaucugaaagagcagcacuucucagcua

SEQ ID NO: 422984 - RNA, 32 nt, Homo Sapiens
uuuuuauauuacugaggccuaaaaguaaacau

SEQ ID NO: 422985 - RNA, 32 nt, Homo Sapiens
uuugaagaaacuauacauuuauuguuacggua

SEQ ID NO: 422986 - RNA, 28 nt, Homo Sapiens
agaugaaaaaauuuaaaaaaaaaaaaaa

SEQ ID NO: 422987 - RNA, 32 nt, Homo Sapiens
uuuuguuaaguacagauaaaagcuauugugug

SEQ ID NO: 422988 - RNA, 32 nt, Homo Sapiens
agaaggugccaugaaaccagguccuggaacag

SEQ ID NO: 422989 - RNA, 32 nt, Homo Sapiens
ugcaguuuuugucugaucauguucaagaaaug

SEQ ID NO: 422990 - RNA, 32 nt, Homo Sapiens
caucauuccuauucuucaguggaugccagcuu

SEQ ID NO: 422991 - RNA, 32 nt, Homo Sapiens
aacacccccaagguucuccccuccccccgcug

SEQ ID NO: 422992 - RNA, 32 nt, Homo Sapiens
cugagaccggggcaaacugaaaaaauucaaaa

SEQ ID NO: 422993 - RNA, 31 nt, Homo Sapiens
augaaaacagagaaaaaauguaugugcuuga

SEQ ID NO: 422994 - RNA, 32 nt, Homo Sapiens
gguccccuggaagaggcccgagagggggcugg

SEQ ID NO: 422995 - RNA, 32 nt, Homo Sapiens
ucaugugagcgcgggcagcgggcagggacuga

SEQ ID NO: 422996 - RNA, 32 nt, Homo Sapiens
gagaaagaagauacaagguggggaaaucugga

SEQ ID NO: 422997 - RNA, 32 nt, Homo Sapiens
gcgucugucgggggcgcgcucggguaccugua

SEQ ID NO: 422998 - RNA, 32 nt, Homo Sapiens
ucuuggucgcagaacuuggcuuuccgcuauug

SEQ ID NO: 422999 - RNA, 32 nt, Homo Sapiens
accgagacagcccccaggacccugagaggcag

SEQ ID NO: 423000 - RNA, 32 nt, Homo Sapiens
gucauguauugggauagucagggaucccugcc

SEQ ID NO: 423001 - RNA, 32 nt, Homo Sapiens
aacagcgggcuggggcagccacugcuuacacu

SEQ ID NO: 423002 - RNA, 32 nt, Homo Sapiens
uugcaggagagcuuuuuguacaugcuuuuagg

SEQ ID NO: 423003 - RNA, 32 nt, Homo Sapiens
auaguucuuuaaaaauauuucucuacuuuuaa

SEQ ID NO: 423004 - RNA, 32 nt, Homo Sapiens
ugcccauaccuccuccucccuucuuucuuuga

SEQ ID NO: 423005 - RNA, 32 nt, Homo Sapiens
gaauuuacucauuuaacaaacauccauucacc

SEQ ID NO: 423006 - RNA, 32 nt, Homo Sapiens
cugugcugucucccggcaucuccucacuaucu

SEQ ID NO: 423007 - RNA, 32 nt, Homo Sapiens
aaugaggaaaauuugcuccacuacaaccauua

SEQ ID NO: 423008 - RNA, 32 nt, Homo Sapiens
ugcucgugucuguugacagaccucuuucuuuc

SEQ ID NO: 423009 - RNA, 32 nt, Homo Sapiens
uuucuuaccagucuccuccccuacucugcccc

SEQ ID NO: 423010 - RNA, 32 nt, Homo Sapiens
ugcauuucaaaaggaaaguugguuuugagccc

SEQ ID NO: 423011 - RNA, 32 nt, Homo Sapiens
gucucagcuacuugggaggccauggugggagg

SEQ ID NO: 423012 - RNA, 32 nt, Homo Sapiens
gcaggggagagccggucacgguggcuggucuu

SEQ ID NO: 423013 - RNA, 32 nt, Homo Sapiens
ccucaguucucacgccuuccuguccaguggaa

SEQ ID NO: 423014 - RNA, 32 nt, Homo Sapiens
gaaggagaugaccggaagcaaccccuucacag

SEQ ID NO: 423015 - RNA, 32 nt, Homo Sapiens
aggcugcuguguagcucuguccacucugaaua

SEQ ID NO: 423016 - RNA, 32 nt, Homo Sapiens
ugagugugugugcaugaggcauaucauuaaua

SEQ ID NO: 423017 - RNA, 32 nt, Homo Sapiens
ucucaaugaagagguauuuccuaauaggagac

SEQ ID NO: 423018 - RNA, 32 nt, Homo Sapiens
uugaagaggggaggggccuagggagccgcacc

SEQ ID NO: 423019 - RNA, 32 nt, Homo Sapiens
cccagaccaucccagccaccccccaucuuccu

SEQ ID NO: 423020 - RNA, 32 nt, Homo Sapiens
uccugcuuagggucccugguuccaguuauuuu

SEQ ID NO: 423021 - RNA, 32 nt, Homo Sapiens
acaucuggcuucccuucucagccucaugucca

SEQ ID NO: 423022 - RNA, 30 nt, Homo Sapiens
ucccgugccucuaugggggaagcagacaau

SEQ ID NO: 423023 - RNA, 32 nt, Homo Sapiens
cuaaaauuccaagaaugugcuuuuagacgguc

SEQ ID NO: 423024 - RNA, 32 nt, Homo Sapiens
acuugggacagaggaagcaauaugguggggau

SEQ ID NO: 423025 - RNA, 32 nt, Homo Sapiens
aggcuguacuauauauuuauuucuaaauguuu

SEQ ID NO: 423026 - RNA, 32 nt, Homo Sapiens
acuccuugccucaaguaauccauccaccucca

SEQ ID NO: 423027 - RNA, 32 nt, Homo Sapiens
caagcgcucuccaagcacccccggccuggggg

SEQ ID NO: 423028 - RNA, 32 nt, Homo Sapiens
gcaguauggccauuuuaaugauguugauucuu

SEQ ID NO: 423029 - RNA, 32 nt, Homo Sapiens
agcugugggaggucaucgcggggcauugcagg

SEQ ID NO: 423030 - RNA, 32 nt, Homo Sapiens
uuuuaauuagguuaacuauguacaauauuuua

SEQ ID NO: 423031 - RNA, 32 nt, Homo Sapiens
cuuggaacucuucuguggcaucugaagcagau

SEQ ID NO: 423032 - RNA, 31 nt, Homo Sapiens
ugggggcagcgcagcaggagcaucguggggc

SEQ ID NO: 423033 - RNA, 32 nt, Homo Sapiens
aauaaaugcacacaagaaaauauguguuuuuc

SEQ ID NO: 423034 - RNA, 32 nt, Homo Sapiens
uugggaauaauaaaaugaaauaauacuuuuau

SEQ ID NO: 423035 - RNA, 32 nt, Homo Sapiens
cagcaagacccgagauguguauggagaguuag

SEQ ID NO: 423036 - RNA, 32 nt, Homo Sapiens
ggugcacaagcacggucuccucugaguucacc

SEQ ID NO: 423037 - RNA, 32 nt, Homo Sapiens
aaaaacaagauuacaagggggaauaauauuua

SEQ ID NO: 423038 - RNA, 32 nt, Homo Sapiens
aacugcaauuuaauucuuguucuuugcaccuc

SEQ ID NO: 423039 - RNA, 32 nt, Homo Sapiens
ccuuucugcccccaauuucacacauggaugau

SEQ ID NO: 423040 - RNA, 32 nt, Homo Sapiens
gaugcuaaauaaauuauauaucagaaaacuuu

SEQ ID NO: 423041 - RNA, 32 nt, Homo Sapiens
cugagcuagggguuuuccuguggaaggucuga

SEQ ID NO: 423042 - RNA, 32 nt, Homo Sapiens
uuuaguggagacgggguuucaccguguuagcc

SEQ ID NO: 423043 - RNA, 32 nt, Homo Sapiens
cgccuccgcggagguagccguucccugaccua

SEQ ID NO: 423044 - RNA, 32 nt, Homo Sapiens
ggagaggccaagggcugccuccuaucagagag

SEQ ID NO: 423045 - RNA, 32 nt, Homo Sapiens
cagugaagucagacucagaacuagguccuggg

SEQ ID NO: 423046 - RNA, 32 nt, Homo Sapiens
ggguuuuugcgcuacauaggagaaagaucugg

SEQ ID NO: 423047 - RNA, 32 nt, Homo Sapiens
aagaggggcaauggcugcuuucagcuuugagg

SEQ ID NO: 423048 - RNA, 32 nt, Homo Sapiens
ugagcggcggguggcagcaggggacuccugac

SEQ ID NO: 423049 - RNA, 30 nt, Homo Sapiens
uugguaugauucaacaccuuuuaucagcug

SEQ ID NO: 423050 - RNA, 32 nt, Homo Sapiens
agaaauuccaggaaaaucugcacugugggcuu

SEQ ID NO: 423051 - RNA, 32 nt, Homo Sapiens
uguaguggguccugaaaauuauguagccaguc

SEQ ID NO: 423052 - RNA, 32 nt, Homo Sapiens
agcuuggggaagcucauuugaggagugguggu

SEQ ID NO: 423053 - RNA, 32 nt, Homo Sapiens
agacgacagcccuauagagacuauuuaaccag

SEQ ID NO: 423054 - RNA, 32 nt, Homo Sapiens
agugccucaagccccagaguggcucacccugu

SEQ ID NO: 423055 - RNA, 32 nt, Homo Sapiens
aacaaaaaccaucaaaagaaacggacacaggu

SEQ ID NO: 423056 - RNA, 32 nt, Homo Sapiens
gaacaacagcuaucuagauagcugacucauuc

SEQ ID NO: 423057 - RNA, 32 nt, Homo Sapiens
agacugagaagauaaaauggucagguuguugg

SEQ ID NO: 423058 - RNA, 32 nt, Homo Sapiens
uccuggcacuuccagcugggugucccacaugu

SEQ ID NO: 423059 - RNA, 32 nt, Homo Sapiens
caguguguccuugaaccugacuguagcuguuu

SEQ ID NO: 423060 - RNA, 32 nt, Homo Sapiens
ccgggcgcucugaggcuucuuucuccucgccc

SEQ ID NO: 423061 - RNA, 32 nt, Homo Sapiens
gggcugugcgccccgccggcgccgguaggagc

SEQ ID NO: 423062 - RNA, 32 nt, Homo Sapiens
ccagagccugaaagugcuguccugugccugcc

SEQ ID NO: 423063 - RNA, 32 nt, Homo Sapiens
cccugccagaaucugccgccccuccaucuucu

SEQ ID NO: 423064 - RNA, 32 nt, Homo Sapiens
gucgcugcggcauccucccgccgcccagcccc

SEQ ID NO: 423065 - RNA, 32 nt, Homo Sapiens
acguucccauucuaauuaaugcccuuucuuau

SEQ ID NO: 423066 - RNA, 32 nt, Homo Sapiens
auucugcccuucccugaccccauuguaauaac

SEQ ID NO: 423067 - RNA, 32 nt, Homo Sapiens
agguaggguucaauguugaagauggcagagcc

SEQ ID NO: 423068 - RNA, 32 nt, Homo Sapiens
ucaauaauuuaaaagacaugaaugucauuaga

SEQ ID NO: 423069 - RNA, 32 nt, Homo Sapiens
ugugacagugcuucugacaacaucucaaacuu

SEQ ID NO: 423070 - RNA, 30 nt, Homo Sapiens
ggaugaggagggggaaaccgggggaaaaga

SEQ ID NO: 423071 - RNA, 32 nt, Homo Sapiens
uuaggagaacauucuaguugguaaauuucaaa

SEQ ID NO: 423072 - RNA, 32 nt, Homo Sapiens
uacagugccuaccugcuguuuggcaccgacua

SEQ ID NO: 423073 - RNA, 32 nt, Homo Sapiens
gaagaaucucagccagaguccugaacagcagc

SEQ ID NO: 423074 - RNA, 32 nt, Homo Sapiens
ggugcuuguauauaaucggauaaacaaaacug

SEQ ID NO: 423075 - RNA, 32 nt, Homo Sapiens
caccuauaauccuagcacuuugggaggccaac

SEQ ID NO: 423076 - RNA, 32 nt, Homo Sapiens
cuccacgcgcggccuggcggcggcggccacuc

SEQ ID NO: 423077 - RNA, 32 nt, Homo Sapiens
uuuugacaaaaauguuuguacuuuuuaauguu

SEQ ID NO: 423078 - RNA, 32 nt, Homo Sapiens
gcaccuuuucuuucuuagacuaaguaacccag

SEQ ID NO: 423079 - RNA, 32 nt, Homo Sapiens
gcuuagccaagcccuaagccuguccccagacc

SEQ ID NO: 423080 - RNA, 32 nt, Homo Sapiens
guuuucaguugaucacuggcaaugaaaaauuc

SEQ ID NO: 423081 - RNA, 32 nt, Homo Sapiens
uuauuuuucuucuuaugcuauauccccaaguu

SEQ ID NO: 423082 - RNA, 32 nt, Homo Sapiens
gcccauggucaucugcagcugcacgaguuagg

SEQ ID NO: 423083 - RNA, 32 nt, Homo Sapiens
gugggaggcgcgcgcggaggccgcgacggacg

SEQ ID NO: 423084 - RNA, 27 nt, Homo Sapiens
uacugcccuuaacucugguauacacca

SEQ ID NO: 423085 - RNA, 32 nt, Homo Sapiens
gacccgggcaaggcccauugugaugcgugcca

SEQ ID NO: 423086 - RNA, 32 nt, Homo Sapiens
ugguaagaugauugcaaguugucaugaagaua

SEQ ID NO: 423087 - RNA, 32 nt, Homo Sapiens
aaaguaccuguagcugcggcgcugaggucgga

SEQ ID NO: 423088 - RNA, 32 nt, Homo Sapiens
ggcucaagugauccuccugccucagccuccuu

SEQ ID NO: 423089 - RNA, 32 nt, Homo Sapiens
cuuggcucgauauuacaagaccaagcgagucc

SEQ ID NO: 423090 - RNA, 32 nt, Homo Sapiens
cguggcuccugcgcgcacacccccaggagcac

SEQ ID NO: 423091 - RNA, 32 nt, Homo Sapiens
aaaauggaaaauuuauauguauuuuuaccaca

SEQ ID NO: 423092 - RNA, 32 nt, Homo Sapiens
gcuguggaggauguaguuguauuuauugcauu

SEQ ID NO: 423093 - RNA, 32 nt, Homo Sapiens
agccuggccaacaucaugaaaccccgucucua

SEQ ID NO: 423094 - RNA, 32 nt, Homo Sapiens
ugacuucuggucgucugcacugcuacauuccc

SEQ ID NO: 423095 - RNA, 32 nt, Homo Sapiens
gcuuagguugaaugcuggccucucugcaaagc

SEQ ID NO: 423096 - RNA, 32 nt, Homo Sapiens
aaaguuccuaccaaauauacauguauaaaguu

SEQ ID NO: 423097 - RNA, 32 nt, Homo Sapiens
caugaaguacuucaagggccaagcugccccuu

SEQ ID NO: 423098 - RNA, 32 nt, Homo Sapiens
uuauugcacuggcuugaauacaguagcagugu

SEQ ID NO: 423099 - RNA, 29 nt, Homo Sapiens
cccggugggggacagugcgccgaggcugc

SEQ ID NO: 423100 - RNA, 32 nt, Homo Sapiens
ggcgacgguggcagcgccauggagccggggga

SEQ ID NO: 423101 - RNA, 32 nt, Homo Sapiens
aagaagcaucaagguuuuaaaaacgaaugcua

SEQ ID NO: 423102 - RNA, 32 nt, Homo Sapiens
gggcccgagcgcccagcuccucgcuccccagu

SEQ ID NO: 423103 - RNA, 32 nt, Homo Sapiens
uuccuccucucaaaccuggcagaugggggccu

SEQ ID NO: 423104 - RNA, 32 nt, Homo Sapiens
uuuucuucugacaguauaauuuauugaguuac

SEQ ID NO: 423105 - RNA, 32 nt, Homo Sapiens
cacagaaguguugaauugaaauccacagagca

SEQ ID NO: 423106 - RNA, 32 nt, Homo Sapiens
auaggccuuccacuccaacaguguuuaccaga

SEQ ID NO: 423107 - RNA, 32 nt, Homo Sapiens
aacaagcacaauaccuagguuaccacacacca

SEQ ID NO: 423108 - RNA, 32 nt, Homo Sapiens
gaaccaaauggcaagggagaaggcuccaccag

SEQ ID NO: 423109 - RNA, 32 nt, Homo Sapiens
acacuucaguugcugcaaaacaaccccagacu

SEQ ID NO: 423110 - RNA, 30 nt, Homo Sapiens
aaaagauggaagauuuaacuaauguaucaa

SEQ ID NO: 423111 - RNA, 32 nt, Homo Sapiens
ugauuuccugauguccaugucuauauguuuac

SEQ ID NO: 423112 - RNA, 32 nt, Homo Sapiens
ugcuggccgggagccccuccccggggaguucu

SEQ ID NO: 423113 - RNA, 32 nt, Homo Sapiens
uaaagucguuaccauggugaccgcgacacacu

SEQ ID NO: 423114 - RNA, 30 nt, Homo Sapiens
gcagcauggauucucuaccagaugaauuuu

SEQ ID NO: 423115 - RNA, 32 nt, Homo Sapiens
ugcaggcugcagcggcagcuccagauggccuc

SEQ ID NO: 423116 - RNA, 32 nt, Homo Sapiens
uggaaaaugaaauauaugguuauuagacauau

SEQ ID NO: 423117 - RNA, 32 nt, Homo Sapiens
agguggcuccacgaugccuugauuuucacuca

SEQ ID NO: 423118 - RNA, 32 nt, Homo Sapiens
gaggcggauucuuggcgccggagaagaggcag

SEQ ID NO: 423119 - RNA, 32 nt, Homo Sapiens
auuuuagccuaguuuaaaacuuucuaauaauu

SEQ ID NO: 423120 - RNA, 32 nt, Homo Sapiens
cugaaauccuacagaccaaaauccacuuguca

SEQ ID NO: 423121 - RNA, 32 nt, Homo Sapiens
acugacuuaaauuugauaaaucuccuguugag

SEQ ID NO: 423122 - RNA, 32 nt, Homo Sapiens
gggguaaagcagccugucgcuugccgggcagc

SEQ ID NO: 423123 - RNA, 32 nt, Homo Sapiens
cccggaucuccuuccacugcgccccgcgcucu

SEQ ID NO: 423124 - RNA, 32 nt, Homo Sapiens
aggaguaggugugaguugauaauuguugaagu

SEQ ID NO: 423125 - RNA, 32 nt, Homo Sapiens
guuacacaaaauaaacaauggcauugucauag

SEQ ID NO: 423126 - RNA, 32 nt, Homo Sapiens
gggucgcgagaauggaagcgcgcguccgggag

SEQ ID NO: 423127 - RNA, 32 nt, Homo Sapiens
uggauaauuuaaaagcuuaguaaugucugguc

SEQ ID NO: 423128 - RNA, 32 nt, Homo Sapiens
aagcauaauguuuucauaauuuucuauuugaa

SEQ ID NO: 423129 - RNA, 30 nt, Homo Sapiens
ggaggaggcaggcggcggccccgguggcuc

SEQ ID NO: 423130 - RNA, 32 nt, Homo Sapiens
uuuaucaagucguauuuuauuguacaggagcc

SEQ ID NO: 423131 - RNA, 32 nt, Homo Sapiens
uuacauugucugcaccuuuguacuucuuuauu

SEQ ID NO: 423132 - RNA, 32 nt, Homo Sapiens
ucuggcgccccgagaaccaggcaucccucccu

SEQ ID NO: 423133 - RNA, 28 nt, Homo Sapiens
gauguaagauaucugcauuugaagauau

SEQ ID NO: 423134 - RNA, 27 nt, Homo Sapiens
aacaguugucuguccagcccccacccc

SEQ ID NO: 423135 - RNA, 32 nt, Homo Sapiens
gaugacccaucccucccgucccauccccagca

SEQ ID NO: 423136 - RNA, 32 nt, Homo Sapiens
cuucucucuugcuccuagaguccuccugagga

SEQ ID NO: 423137 - RNA, 32 nt, Homo Sapiens
uauauuacugaauucuauaugccaauauuauu

SEQ ID NO: 423138 - RNA, 32 nt, Homo Sapiens
uauucuaaacacauugaagacacucacuucau

SEQ ID NO: 423139 - RNA, 32 nt, Homo Sapiens
uccaaccuuucuguggccucaaauguuuuaag

SEQ ID NO: 423140 - RNA, 32 nt, Homo Sapiens
auacaaucucuuaguggcuaggagaaauaaau

SEQ ID NO: 423141 - RNA, 32 nt, Homo Sapiens
gguucaguggccuggcuguuggcaggaacucc

SEQ ID NO: 423142 - RNA, 32 nt, Homo Sapiens
auccuccggccgcugcgccgccaggggugaga

SEQ ID NO: 423143 - RNA, 32 nt, Homo Sapiens
cacacgagguaacauuuauuuuccacagggua

SEQ ID NO: 423144 - RNA, 32 nt, Homo Sapiens
agagugaaaggaccuuugggggugggugggag

SEQ ID NO: 423145 - RNA, 32 nt, Homo Sapiens
ggaggucacacugcccgucggaccuuggcaug

SEQ ID NO: 423146 - RNA, 32 nt, Homo Sapiens
aauucggcacgagguagcuucucucagccuag

SEQ ID NO: 423147 - RNA, 32 nt, Homo Sapiens
cccccgggccaugaagaggggcccgugaggcg

SEQ ID NO: 423148 - RNA, 32 nt, Homo Sapiens
uaaauaguuaaacuuucuuuuaaaauuggaau

SEQ ID NO: 423149 - RNA, 32 nt, Homo Sapiens
aacacacccuuaaaucuggaagcagcuaagag

SEQ ID NO: 423150 - RNA, 32 nt, Homo Sapiens
uguuugcagcgccugugguaacuguggaauga

SEQ ID NO: 423151 - RNA, 32 nt, Homo Sapiens
gaggagcaacaccugugccgcggccggaggag

SEQ ID NO: 423152 - RNA, 32 nt, Homo Sapiens
uuugucuuuuaauguuuuuucaauguuuuaaa

SEQ ID NO: 423153 - RNA, 32 nt, Homo Sapiens
uucaaaaguauuugauaucuuaacaauguguu

SEQ ID NO: 423154 - RNA, 32 nt, Homo Sapiens
cuuauggagcagcccagauuaucuuuacuccc

SEQ ID NO: 423155 - RNA, 32 nt, Homo Sapiens
ccuugagacugaugaacagucuggccaagagg

SEQ ID NO: 423156 - RNA, 32 nt, Homo Sapiens
gucuggaggcagcagggaugcugcugggaguc

SEQ ID NO: 423157 - RNA, 32 nt, Homo Sapiens
gacagacagucuuuuuacugcuggauugugca

SEQ ID NO: 423158 - RNA, 32 nt, Homo Sapiens
gccagccacccugaccucccccagggcuccuc

SEQ ID NO: 423159 - RNA, 32 nt, Homo Sapiens
gcaccucuggugccagugucgccccgccuccg

SEQ ID NO: 423160 - RNA, 30 nt, Homo Sapiens
uaauuuuuggucggcggcggugcugggcca

SEQ ID NO: 423161 - RNA, 32 nt, Homo Sapiens
guuucucuuuucugccccguagugagguucug

SEQ ID NO: 423162 - RNA, 32 nt, Homo Sapiens
gcucccuccccgcucgcuuccucccccaccau

SEQ ID NO: 423163 - RNA, 32 nt, Homo Sapiens
acugauaaaugaauugguaccuagugauuaau

SEQ ID NO: 423164 - RNA, 32 nt, Homo Sapiens
cucuccuccggcggucgcccgcgcucggugga

SEQ ID NO: 423165 - RNA, 32 nt, Homo Sapiens
cuggucaagaagcaucgugucuggcguugugg

SEQ ID NO: 423166 - RNA, 32 nt, Homo Sapiens
cugauuuaaaaguugauuuacuuuuuauuaag

SEQ ID NO: 423167 - RNA, 32 nt, Homo Sapiens
gagaugagggagagagagccagagacaguguu

SEQ ID NO: 423168 - RNA, 32 nt, Homo Sapiens
uguagcagaggugacagccaagggcaguccug

SEQ ID NO: 423169 - RNA, 32 nt, Homo Sapiens
cgugacccagcaugcaaagaagccuggagcca

SEQ ID NO: 423170 - RNA, 32 nt, Homo Sapiens
acccagggacccccuuuccucagccuccaccu

SEQ ID NO: 423171 - RNA, 32 nt, Homo Sapiens
cugaaagccauuggcugcugcacgggagcagc

SEQ ID NO: 423172 - RNA, 32 nt, Homo Sapiens
cggggagagggauaaaaccugaaugccauauu

SEQ ID NO: 423173 - RNA, 32 nt, Homo Sapiens
uuggcucagacucugcacuggcacugagccuu

SEQ ID NO: 423174 - RNA, 32 nt, Homo Sapiens
uccgcgucgucuccggggcacuuaguaagggg

SEQ ID NO: 423175 - RNA, 32 nt, Homo Sapiens
cgcguggaucccacgcagcgcugaaccgaacc

SEQ ID NO: 423176 - RNA, 32 nt, Homo Sapiens
uucuuugaauguuccauuguuccgauaaguau

SEQ ID NO: 423177 - RNA, 32 nt, Homo Sapiens
ggccccgggccgcccgcgcuccccaugaaaaa

SEQ ID NO: 423178 - RNA, 32 nt, Homo Sapiens
agaggcccugggaguguccggucgggguugga

SEQ ID NO: 423179 - RNA, 32 nt, Homo Sapiens
gcaaaggccucaucaagaagugccggaccagc

SEQ ID NO: 423180 - RNA, 32 nt, Homo Sapiens
ucccgccugcccgcccucccccacguggcccc

SEQ ID NO: 423181 - RNA, 32 nt, Homo Sapiens
gggaucccgagaaaccgcagccaggcgcucag

SEQ ID NO: 423182 - RNA, 32 nt, Homo Sapiens
uccuccauuaugucuucgucucuuccaaccua

SEQ ID NO: 423183 - RNA, 32 nt, Homo Sapiens
auaaaauuguauauuuuuuccaucucauaaau

SEQ ID NO: 423184 - RNA, 32 nt, Homo Sapiens
gaacuguuuuaacguaagacaaacugauagca

SEQ ID NO: 423185 - RNA, 32 nt, Homo Sapiens
guguaacguuuugguugagauguuaaauggug

SEQ ID NO: 423186 - RNA, 32 nt, Homo Sapiens
gauugcgggcggcugagacgccgccugccugg

SEQ ID NO: 423187 - RNA, 32 nt, Homo Sapiens
gaaggaaaucccaaguaaacuggaagcacaau

SEQ ID NO: 423188 - RNA, 32 nt, Homo Sapiens
ccgugugcguggcaggggcggcugggagggua

SEQ ID NO: 423189 - RNA, 32 nt, Homo Sapiens
ugggucugggugaaccuaucccggcccucuug

SEQ ID NO: 423190 - RNA, 32 nt, Homo Sapiens
gugcccugccaagcuuccuccccucccuuccu

SEQ ID NO: 423191 - RNA, 32 nt, Homo Sapiens
gaagcugugaguaugcaacgccaggcacccua

SEQ ID NO: 423192 - RNA, 32 nt, Homo Sapiens
gguugcuucucccuaguuccagcccugcccug

SEQ ID NO: 423193 - RNA, 32 nt, Homo Sapiens
guguggggaaugggaagaaguaguuuacuuug

SEQ ID NO: 423194 - RNA, 32 nt, Homo Sapiens
uauauacuuuaaaauguaauuuuugcuuuuca

SEQ ID NO: 423195 - RNA, 27 nt, Homo Sapiens
ggauggaucagaccugugaacuaccca

SEQ ID NO: 423196 - RNA, 32 nt, Homo Sapiens
ggggcugcacgaggguccggcccgccugcccg

SEQ ID NO: 423197 - RNA, 32 nt, Homo Sapiens
cuuugggguuccuggggugggcuuggggugag

SEQ ID NO: 423198 - RNA, 32 nt, Homo Sapiens
cuccgccguguucguguccccaggcgcccucg

SEQ ID NO: 423199 - RNA, 32 nt, Homo Sapiens
ucaugggcugauuuuuauuaccagguccccca

SEQ ID NO: 423200 - RNA, 32 nt, Homo Sapiens
cugcguaaucuggacguuuccaaacugaagcg

SEQ ID NO: 423201 - RNA, 32 nt, Homo Sapiens
uauugacuuuuucucuuuuuuauuugggauaa

SEQ ID NO: 423202 - RNA, 29 nt, Homo Sapiens
uucaaauaaaguuauuucuccuggucuca

SEQ ID NO: 423203 - RNA, 32 nt, Homo Sapiens
acagccuuuguuuucugagauaccaaagagag

SEQ ID NO: 423204 - RNA, 32 nt, Homo Sapiens
auggagucucacucuugucacccaggcuggag

SEQ ID NO: 423205 - RNA, 32 nt, Homo Sapiens
cacgcagcuccaccccagucccaagccaccag

SEQ ID NO: 423206 - RNA, 32 nt, Homo Sapiens
ggggccaagagugggguauggugggccuuggc

SEQ ID NO: 423207 - RNA, 32 nt, Homo Sapiens
aaaaaaacaaaauaacaaucugaagaggcauu

SEQ ID NO: 423208 - RNA, 32 nt, Homo Sapiens
ugaacugggaugcaaguugcuaaccgauguga

SEQ ID NO: 423209 - RNA, 32 nt, Homo Sapiens
gagccgcucccucccugcuggucagguccaag

SEQ ID NO: 423210 - RNA, 32 nt, Homo Sapiens
gcggcccuggauccggcgucagggcgaccggg

SEQ ID NO: 423211 - RNA, 32 nt, Homo Sapiens
uucuugaggucugaggcccagcagccucuaga

SEQ ID NO: 423212 - RNA, 32 nt, Homo Sapiens
aagcguccauucuccuagaccggcacuuaaag

SEQ ID NO: 423213 - RNA, 32 nt, Homo Sapiens
ggaaggggcuacugaggaaacacugguggcau

SEQ ID NO: 423214 - RNA, 32 nt, Homo Sapiens
agccugggccccacaugagauucauggcagga

SEQ ID NO: 423215 - RNA, 32 nt, Homo Sapiens
aacacugcauaucugguguuugcaauacuccc

SEQ ID NO: 423216 - RNA, 32 nt, Homo Sapiens
acccugugugugucauccugaggggcugugug

SEQ ID NO: 423217 - RNA, 32 nt, Homo Sapiens
uccugccuuaguucagaccaccaccgucgcuc

SEQ ID NO: 423218 - RNA, 32 nt, Homo Sapiens
uggacaugauggauccacggauguacagcaga

SEQ ID NO: 423219 - RNA, 32 nt, Homo Sapiens
ggcgaagggacgcccgcugugucuccgcccug

SEQ ID NO: 423220 - RNA, 32 nt, Homo Sapiens
gcccugccugacgauguaucgaaaagaugaga

SEQ ID NO: 423221 - RNA, 32 nt, Homo Sapiens
agauucaguuugucacccaggcuggagugcug

SEQ ID NO: 423222 - RNA, 32 nt, Homo Sapiens
gcauaaacuugagguggaagauaccuugagga

SEQ ID NO: 423223 - RNA, 32 nt, Homo Sapiens
cuauguacuguaauagugugauuacuaugcuc

SEQ ID NO: 423224 - RNA, 32 nt, Homo Sapiens
cuucuguuaagugaugcuuuucuaaccguuuu

SEQ ID NO: 423225 - RNA, 32 nt, Homo Sapiens
ucucugccagcuuccugaguucugccuaaaga

SEQ ID NO: 423226 - RNA, 32 nt, Homo Sapiens
auaauccauuuucucuuugcuagaaaaucagc

SEQ ID NO: 423227 - RNA, 32 nt, Homo Sapiens
uccugcuguugccucccugugaccuggaggac

SEQ ID NO: 423228 - RNA, 32 nt, Homo Sapiens
cacccccagccucggcggcagaggcucccggc

SEQ ID NO: 423229 - RNA, 32 nt, Homo Sapiens
aucguaccaaauauuucauauuucacauuuua

SEQ ID NO: 423230 - RNA, 32 nt, Homo Sapiens
cccacucaccugcccgccugcccgcccgcccg

SEQ ID NO: 423231 - RNA, 32 nt, Homo Sapiens
augugaagauugauaaaucaguuuuuacuugu

SEQ ID NO: 423232 - RNA, 32 nt, Homo Sapiens
agcccacucccucucccaaggccacuggaucc

SEQ ID NO: 423233 - RNA, 32 nt, Homo Sapiens
auccagcaaaaagaaaugaaaagggaaaacca

SEQ ID NO: 423234 - RNA, 32 nt, Homo Sapiens
auuuguuuuauccaucaaaaaaugcacucuca

SEQ ID NO: 423235 - RNA, 32 nt, Homo Sapiens
ccugauuauuguggaauuuucuuaagagguuu

SEQ ID NO: 423236 - RNA, 32 nt, Homo Sapiens
aggauaaguguugcuuucaguaguuauugcca

SEQ ID NO: 423237 - RNA, 32 nt, Homo Sapiens
ccccugacuaauuuuucuuuuuuaaaauuuuu

SEQ ID NO: 423238 - RNA, 32 nt, Homo Sapiens
caaccagggagugccacgccaguguccccugc

SEQ ID NO: 423239 - RNA, 32 nt, Homo Sapiens
ccagaagacauuaaugacucucacuuaugaaa

SEQ ID NO: 423240 - RNA, 32 nt, Homo Sapiens
gggcccacaggccccaggccaaugucugucag

SEQ ID NO: 423241 - RNA, 32 nt, Homo Sapiens
agauagcccagccccagggaccccacagccau

SEQ ID NO: 423242 - RNA, 31 nt, Homo Sapiens
gcagcuuucugcagccaaugagggauugaau

SEQ ID NO: 423243 - RNA, 32 nt, Homo Sapiens
gccugcgcuccuuagauuaggaugcucuggua

SEQ ID NO: 423244 - RNA, 32 nt, Homo Sapiens
aaacaucauguagauagcacaaguauuuggag

SEQ ID NO: 423245 - RNA, 32 nt, Homo Sapiens
uucaagugauucuccugccucugccuccugag

SEQ ID NO: 423246 - RNA, 32 nt, Homo Sapiens
gaacaugaagcagggggugcugauggcuaaag

SEQ ID NO: 423247 - RNA, 32 nt, Homo Sapiens
gcuugucagccccacgcugugcuccugcgucu

SEQ ID NO: 423248 - RNA, 32 nt, Homo Sapiens
aggccccugccagguguggguccacagcagca

SEQ ID NO: 423249 - RNA, 32 nt, Homo Sapiens
ucccggcgccgacccaagcaccgggcgcuaag

SEQ ID NO: 423250 - RNA, 32 nt, Homo Sapiens
ggggccgccacggcucuuccgcgcucccgggc

SEQ ID NO: 423251 - RNA, 32 nt, Homo Sapiens
gcguuauuuuuggggagggagggcugugcaua

SEQ ID NO: 423252 - RNA, 32 nt, Homo Sapiens
uucuucaucuucuuggucuacugccuccucag

SEQ ID NO: 423253 - RNA, 32 nt, Homo Sapiens
gauugggagggaccgcucacucgggggaaaug

SEQ ID NO: 423254 - RNA, 32 nt, Homo Sapiens
uuuuuaaauagaaagcacuucaaaacuaaaau

SEQ ID NO: 423255 - RNA, 32 nt, Homo Sapiens
ccauuagaguucuucaauucaaugcacguuca

SEQ ID NO: 423256 - RNA, 32 nt, Homo Sapiens
uacaaaauuagccaggcauaguagugugugcc

SEQ ID NO: 423257 - RNA, 32 nt, Homo Sapiens
agaucaugcccugaccuccaauaaaaaccucu

SEQ ID NO: 423258 - RNA, 32 nt, Homo Sapiens
uuguaaugcugccgaguccggucggugaccac

SEQ ID NO: 423259 - RNA, 32 nt, Homo Sapiens
uguaaguguuuguuuccaggauauuuucuuuu

SEQ ID NO: 423260 - RNA, 32 nt, Homo Sapiens
gcgagaccuagcaggcccggggcugggcgugc

SEQ ID NO: 423261 - RNA, 32 nt, Homo Sapiens
aucgguccagagaggcaaagcaugucauugug

SEQ ID NO: 423262 - RNA, 32 nt, Homo Sapiens
ucaaauauuuaguugauucaugaugaauaaua

SEQ ID NO: 423263 - RNA, 32 nt, Homo Sapiens
aagugguuuccacaguaugauacagccuauaa

SEQ ID NO: 423264 - RNA, 32 nt, Homo Sapiens
cacaugguguauaaauucuuuaccaaggcaac

SEQ ID NO: 423265 - RNA, 32 nt, Homo Sapiens
acacggaagcaugucacaccacugcuuggucu

SEQ ID NO: 423266 - RNA, 32 nt, Homo Sapiens
aguuuuaaauuaauaccucaaguauuaaauaa

SEQ ID NO: 423267 - RNA, 32 nt, Homo Sapiens
ucugugccucugacauaacagucauuucuucc

SEQ ID NO: 423268 - RNA, 32 nt, Homo Sapiens
ccucccuaacuggcacccugugcaaaccugcu

SEQ ID NO: 423269 - RNA, 32 nt, Homo Sapiens
acuuuccucgccugacaaccacuggucuguag

SEQ ID NO: 423270 - RNA, 32 nt, Homo Sapiens
uccacaaauaugucuucacuccugauggaagc

SEQ ID NO: 423271 - RNA, 30 nt, Homo Sapiens
aaaagggaguuucguaagcaaaauagagga

SEQ ID NO: 423272 - RNA, 32 nt, Homo Sapiens
caucuugaugaugauagucaucaucaagaauu

SEQ ID NO: 423273 - RNA, 32 nt, Homo Sapiens
acguccggagucauuaaccaggaauguaugug

SEQ ID NO: 423274 - RNA, 32 nt, Homo Sapiens
cuguacaagcugauguuuuguauuuuguguuc

SEQ ID NO: 423275 - RNA, 32 nt, Homo Sapiens
cagccaacuucccaucagaucaccuugcugga

SEQ ID NO: 423276 - RNA, 32 nt, Homo Sapiens
cuuaagaccucagggggcgggugcuggggucu

SEQ ID NO: 423277 - RNA, 32 nt, Homo Sapiens
gaagaggcagaaaaacaagagauaacaaaggc

SEQ ID NO: 423278 - RNA, 32 nt, Homo Sapiens
aagaaaagcaaaugcauuaguauguuugccuu

SEQ ID NO: 423279 - RNA, 32 nt, Homo Sapiens
ugaaacaagaaauaaugugucuggcaggcaug

SEQ ID NO: 423280 - RNA, 32 nt, Homo Sapiens
uuuggcuguuucucaucaucucauggaaaggu

SEQ ID NO: 423281 - RNA, 32 nt, Homo Sapiens
cucccugcuuccagcccuucucucugcaccuc

SEQ ID NO: 423282 - RNA, 30 nt, Homo Sapiens
cuuccauugcacaguggggaaacugagucu

SEQ ID NO: 423283 - RNA, 32 nt, Homo Sapiens
uauuuuggaaucugaagaauccuauguaaauc

SEQ ID NO: 423284 - RNA, 32 nt, Homo Sapiens
agccaggcccgcgccgccaguggagcccccgc

SEQ ID NO: 423285 - RNA, 32 nt, Homo Sapiens
auggacacugguuuuuagaccucuaucaauca

SEQ ID NO: 423286 - RNA, 32 nt, Homo Sapiens
aagaagaauaaaugucucugguggaacuuuug

SEQ ID NO: 423287 - RNA, 32 nt, Homo Sapiens
uccuggcaggagcugggcuugcuggcugcccu

SEQ ID NO: 423288 - RNA, 32 nt, Homo Sapiens
gccucccugccaggugggccacagugacucau

SEQ ID NO: 423289 - RNA, 32 nt, Homo Sapiens
ucuggccgugucagugcaaauugcauuucuua

SEQ ID NO: 423290 - RNA, 32 nt, Homo Sapiens
cuuggcugauauaaccucuauagugaauacuc

SEQ ID NO: 423291 - RNA, 32 nt, Homo Sapiens
gggcuguuaggcugugcugugcucugcuuaag

SEQ ID NO: 423292 - RNA, 32 nt, Homo Sapiens
gaugccaucuucuggcuuccucaaggagccag

SEQ ID NO: 423293 - RNA, 32 nt, Homo Sapiens
ugggaaggcggacgaggcaucucaggugggug

SEQ ID NO: 423294 - RNA, 32 nt, Homo Sapiens
ccaauuuacagccguauauuuucuuaugaugu

SEQ ID NO: 423295 - RNA, 32 nt, Homo Sapiens
uaagaaaaacauucugaauaaauacuagguua

SEQ ID NO: 423296 - RNA, 32 nt, Homo Sapiens
uaggauuuuuaaaauaacauuucuguaagucu

SEQ ID NO: 423297 - RNA, 32 nt, Homo Sapiens
ucagcuuauuuauaaaaguaauguuauuucca

SEQ ID NO: 423298 - RNA, 32 nt, Homo Sapiens
aaguuucugaagaucaaggccuauauaauuca

SEQ ID NO: 423299 - RNA, 32 nt, Homo Sapiens
uauguaaccagaucagaaaauacagcugaaaa

SEQ ID NO: 423300 - RNA, 32 nt, Homo Sapiens
augaccauguuauagacuuucacuuaugucag

SEQ ID NO: 423301 - RNA, 32 nt, Homo Sapiens
ggaagaaaaugaugaugguuuuuauuccuggc

SEQ ID NO: 423302 - RNA, 32 nt, Homo Sapiens
ccccugcagcucagccaccuccuccucucagg

SEQ ID NO: 423303 - RNA, 32 nt, Homo Sapiens
ggggagcugccuagcagccucuccucgggcag

SEQ ID NO: 423304 - RNA, 32 nt, Homo Sapiens
aucauguggaucuuuggugccuuccgguuggc

SEQ ID NO: 423305 - RNA, 32 nt, Homo Sapiens
cuuaggguggaaugugauguucagcagcaaac

SEQ ID NO: 423306 - RNA, 32 nt, Homo Sapiens
gaucuggugggaaggaaaggcggaagguagaa

SEQ ID NO: 423307 - RNA, 32 nt, Homo Sapiens
agugggcccccggcugccacuguuugcuggug

SEQ ID NO: 423308 - RNA, 32 nt, Homo Sapiens
ugguuuuauuuuuaaucucuuaagucaaugua

SEQ ID NO: 423309 - RNA, 28 nt, Homo Sapiens
aaaauaaaaccucagcuagcuccaccac

SEQ ID NO: 423310 - RNA, 32 nt, Homo Sapiens
cucuguacugucaccaucccuuaagcagcauc

SEQ ID NO: 423311 - RNA, 32 nt, Homo Sapiens
ugggugggccagggaagaacggcagaugcaga

SEQ ID NO: 423312 - RNA, 32 nt, Homo Sapiens
caccgcgucagggaggccggccuagaaacccu

SEQ ID NO: 423313 - RNA, 32 nt, Homo Sapiens
uaaaacaaugguuuuugccuacuucaagagcu

SEQ ID NO: 423314 - RNA, 32 nt, Homo Sapiens
uucaccuuccucaaaaugaggcauaaucuuau

SEQ ID NO: 423315 - RNA, 32 nt, Homo Sapiens
gcauaacuggcguguagcacaaagaaaaagcc

SEQ ID NO: 423316 - RNA, 32 nt, Homo Sapiens
ugugaugcuguaauuuuacuuuucaacauaag

SEQ ID NO: 423317 - RNA, 32 nt, Homo Sapiens
aguucaagaacacauucaaauggugcaugugu

SEQ ID NO: 423318 - RNA, 32 nt, Homo Sapiens
aaugaacaaguuaaugaacaaacaaacuagau

SEQ ID NO: 423319 - RNA, 32 nt, Homo Sapiens
uuuccauuguuuaguguguuugcaaaaaggaa

SEQ ID NO: 423320 - RNA, 32 nt, Homo Sapiens
acaaucagaauggaauuaaaucucuaaaaacg

SEQ ID NO: 423321 - RNA, 32 nt, Homo Sapiens
ucuguguguugcagguggguguugggaagaau

SEQ ID NO: 423322 - RNA, 32 nt, Homo Sapiens
gggaucagcacagcccggcccgcggccccggc

SEQ ID NO: 423323 - RNA, 32 nt, Homo Sapiens
uccuccugccagcagugaaggcuggggcugag

SEQ ID NO: 423324 - RNA, 32 nt, Homo Sapiens
uacagacuauggcaauggggacgcuggugaua

SEQ ID NO: 423325 - RNA, 32 nt, Homo Sapiens
aaguaucgguacgagaucuagccugcccugcc

SEQ ID NO: 423326 - RNA, 32 nt, Homo Sapiens
gacagauguuuaggacuucaagaucacacuug

SEQ ID NO: 423327 - RNA, 32 nt, Homo Sapiens
ccgccagccagcgcuucgcgggcccugucggu

SEQ ID NO: 423328 - RNA, 32 nt, Homo Sapiens
uuuugaucuuuucaaaacuaaaacagacccug

SEQ ID NO: 423329 - RNA, 32 nt, Homo Sapiens
ggaaucuucugccuccuccccacuccaagugu

SEQ ID NO: 423330 - RNA, 32 nt, Homo Sapiens
aacuguacaaaauaauucugucuuugggaggc

SEQ ID NO: 423331 - RNA, 32 nt, Homo Sapiens
uuucaagggggaggagauuuuccacaagaaaa

SEQ ID NO: 423332 - RNA, 32 nt, Homo Sapiens
cugcuuuuuuuuuuuuuuuuuaaguaacuggu

SEQ ID NO: 423333 - RNA, 32 nt, Homo Sapiens
guucuugugggaagagggagguuccaccgcac

SEQ ID NO: 423334 - RNA, 32 nt, Homo Sapiens
ccaaaauuggggauuggagaagucagacucac

SEQ ID NO: 423335 - RNA, 32 nt, Homo Sapiens
ucagauucagaauucacuaaaguaugacgagu

SEQ ID NO: 423336 - RNA, 32 nt, Homo Sapiens
uauaccucuuguucuccuuguccagugguuuc

SEQ ID NO: 423337 - RNA, 32 nt, Homo Sapiens
ucugcaguggaccccaggcaccccccuuugag

SEQ ID NO: 423338 - RNA, 32 nt, Homo Sapiens
augccuuguuaguguaaaugugacuguggaac

SEQ ID NO: 423339 - RNA, 32 nt, Homo Sapiens
ggaagcuguggcucuacuguccccuccagagg

SEQ ID NO: 423340 - RNA, 32 nt, Homo Sapiens
aaagagaaaaaugaaggcagauauauugcaac

SEQ ID NO: 423341 - RNA, 32 nt, Homo Sapiens
ucagaaaucaguaucucaauggguacugugua

SEQ ID NO: 423342 - RNA, 32 nt, Homo Sapiens
gucuuggucaccccggccaggccccggaagca

SEQ ID NO: 423343 - RNA, 32 nt, Homo Sapiens
uauuugcaggcuuuucugaauaccaaaucugc

SEQ ID NO: 423344 - RNA, 32 nt, Homo Sapiens
uuagcccucacagggccccaagguguccgagu

SEQ ID NO: 423345 - RNA, 32 nt, Homo Sapiens
acacuuguuaaaagauuaauacucuuaagugg

SEQ ID NO: 423346 - RNA, 32 nt, Homo Sapiens
cccuuccaacugugucaucucuucucuggagg

SEQ ID NO: 423347 - RNA, 32 nt, Homo Sapiens
gccgugacgaggggcagggagcggcgagcaag

SEQ ID NO: 423348 - RNA, 32 nt, Homo Sapiens
ucucucaggguacccaaugugggaucauuuuu

SEQ ID NO: 423349 - RNA, 32 nt, Homo Sapiens
cgugcuaguucucuucuacaccuacucugucu

SEQ ID NO: 423350 - RNA, 32 nt, Homo Sapiens
cagggccugguggccugguggccaggaaguuu

SEQ ID NO: 423351 - RNA, 32 nt, Homo Sapiens
ucccccucaagcccccacaggagucaccaacc

SEQ ID NO: 423352 - RNA, 32 nt, Homo Sapiens
uuuuuacagaggaggagggcagggcuuggguc

SEQ ID NO: 423353 - RNA, 32 nt, Homo Sapiens
agcuaaguggaauaauacaacguaacuaaaac

SEQ ID NO: 423354 - RNA, 32 nt, Homo Sapiens
auuuuaaaaggguaaccguuaaacagcuagga

SEQ ID NO: 423355 - RNA, 32 nt, Homo Sapiens
cucaggcagcccuucaguggcuucuucaggcc

SEQ ID NO: 423356 - RNA, 32 nt, Homo Sapiens
uagauugguuuuccuuuuuuuuauuuuguaca

SEQ ID NO: 423357 - RNA, 32 nt, Homo Sapiens
aggccucucaaugaccagccaaggcucuugcu

SEQ ID NO: 423358 - RNA, 32 nt, Homo Sapiens
cacacgcacacacgcacacacacacacguaca

SEQ ID NO: 423359 - RNA, 32 nt, Homo Sapiens
cccgcgcagcccucuuuggacacacacgcgcc

SEQ ID NO: 423360 - RNA, 32 nt, Homo Sapiens
caacuuuauuuuuauugucaguuucacuuuug

SEQ ID NO: 423361 - RNA, 32 nt, Homo Sapiens
ggcccauuucccuccugucucccgggggcucu

SEQ ID NO: 423362 - RNA, 32 nt, Homo Sapiens
gauuccagaagcugcccauuaagggagaagga

SEQ ID NO: 423363 - RNA, 32 nt, Homo Sapiens
cugagaccccagccccgcacagaggcucaugg

SEQ ID NO: 423364 - RNA, 32 nt, Homo Sapiens
agguccaaggaccgcaggcggaggcaggaagu

SEQ ID NO: 423365 - RNA, 31 nt, Homo Sapiens
uuucuccaguucugccugcccuggcagaauc

SEQ ID NO: 423366 - RNA, 32 nt, Homo Sapiens
cucugcaauauuuggggcuguagcuccuucca

SEQ ID NO: 423367 - RNA, 32 nt, Homo Sapiens
uggguaaagaacaaaauaaaagccuugucccu

SEQ ID NO: 423368 - RNA, 32 nt, Homo Sapiens
uucuuuugacauuuuggaaauaaucauaacuu

SEQ ID NO: 423369 - RNA, 32 nt, Homo Sapiens
cauaaaaggagaggaagaggcuuuuaaaaacu

SEQ ID NO: 423370 - RNA, 32 nt, Homo Sapiens
ugggacuguggugacuucugcugcuggccccg

SEQ ID NO: 423371 - RNA, 32 nt, Homo Sapiens
agguugcagugagccgagauuaugccacugca

SEQ ID NO: 423372 - RNA, 32 nt, Homo Sapiens
ccuugcccgagcuacagacaggugaggacuuc

SEQ ID NO: 423373 - RNA, 29 nt, Homo Sapiens
cauuuagucauuuucagagauaggaagaa

SEQ ID NO: 423374 - RNA, 32 nt, Homo Sapiens
uccuaaccuuuucauaaccuuuucauaacaug

SEQ ID NO: 423375 - RNA, 32 nt, Homo Sapiens
aaaaauaaguaaaggagaaauauuuuccuaca

SEQ ID NO: 423376 - RNA, 32 nt, Homo Sapiens
aggguagggaggaggggcaugccaccuaauga

SEQ ID NO: 423377 - RNA, 32 nt, Homo Sapiens
gcaggcucucacaguccaccgggcucucgcgg

SEQ ID NO: 423378 - RNA, 32 nt, Homo Sapiens
uggaauuacaguguuagcagucacugaugcuc

SEQ ID NO: 423379 - RNA, 32 nt, Homo Sapiens
gagcucccaagcagaaggugagcacagguguc

SEQ ID NO: 423380 - RNA, 32 nt, Homo Sapiens
uuaaauagccaucuuaaauauucuaccaucua

SEQ ID NO: 423381 - RNA, 32 nt, Homo Sapiens
agagagagaaugccucgguguguaaguggagu

SEQ ID NO: 423382 - RNA, 32 nt, Homo Sapiens
uggcccagugcuuuuucuuacuuuguagcuac

SEQ ID NO: 423383 - RNA, 32 nt, Homo Sapiens
augugaucugucuuguaauauuuuguauuauu

SEQ ID NO: 423384 - RNA, 32 nt, Homo Sapiens
acauguaaugaaauuguagauaaaguguagug

SEQ ID NO: 423385 - RNA, 32 nt, Homo Sapiens
aaucuggucucuucuucuuucugguuguuuuu

SEQ ID NO: 423386 - RNA, 32 nt, Homo Sapiens
cugggauucuagagauuaaaccacugugccau

SEQ ID NO: 423387 - RNA, 32 nt, Homo Sapiens
cagucccgccccagccgccgugugauuuagca

SEQ ID NO: 423388 - RNA, 31 nt, Homo Sapiens
cgcucuggcccgacgccgacggccucucagu

SEQ ID NO: 423389 - RNA, 32 nt, Homo Sapiens
gagucgcugcuuccaaagugcccgccgugagu

SEQ ID NO: 423390 - RNA, 32 nt, Homo Sapiens
uuaguauuuuuccaaguuuucaaaagugccca

SEQ ID NO: 423391 - RNA, 32 nt, Homo Sapiens
gccacccaucggaccgcaugggcuucccgccc

SEQ ID NO: 423392 - RNA, 32 nt, Homo Sapiens
gugugcccgccuuacaugguccaccacccggg

SEQ ID NO: 423393 - RNA, 32 nt, Homo Sapiens
augcccuaaaauguagugacccgugaaaagga

SEQ ID NO: 423394 - RNA, 28 nt, Homo Sapiens
auauguauuguaaacauguguuuuaauu

SEQ ID NO: 423395 - RNA, 32 nt, Homo Sapiens
ccaacuccagcuugcugguuccccauauuauu

SEQ ID NO: 423396 - RNA, 32 nt, Homo Sapiens
ggaaacuaugcuguaugccaagcccccaccca

SEQ ID NO: 423397 - RNA, 32 nt, Homo Sapiens
ccauguguuucugggcagcuuuucugcucagu

SEQ ID NO: 423398 - RNA, 32 nt, Homo Sapiens
aguaaucuuuaagaaauugacucauuguuuaa

SEQ ID NO: 423399 - RNA, 32 nt, Homo Sapiens
ggcgcgacagggaaggcgggcccgagaugggu

SEQ ID NO: 423400 - RNA, 32 nt, Homo Sapiens
ccacccugucuaaauguauuccgggaggucac

SEQ ID NO: 423401 - RNA, 32 nt, Homo Sapiens
ucacaggguuuucaaagagaugcugaggguaa

SEQ ID NO: 423402 - RNA, 32 nt, Homo Sapiens
cacaaagcuaaaguguuacaguucuuuccaga

SEQ ID NO: 423403 - RNA, 32 nt, Homo Sapiens
ccccucacacugaguucacagugcgcccuccc

SEQ ID NO: 423404 - RNA, 32 nt, Homo Sapiens
gaagggccaggugucgggcgcuguuucucguu

SEQ ID NO: 423405 - RNA, 32 nt, Homo Sapiens
aagaaguuguggagcugucugauuccugaucc

SEQ ID NO: 423406 - RNA, 32 nt, Homo Sapiens
gguagauugaaaguccaaaugcacuuuuucca

SEQ ID NO: 423407 - RNA, 32 nt, Homo Sapiens
caggacauuaaaccuuugauuuuaaaaaaaaa

SEQ ID NO: 423408 - RNA, 32 nt, Homo Sapiens
cucccucgacgaaggacccggggcccugguau

SEQ ID NO: 423409 - RNA, 32 nt, Homo Sapiens
gcuugugccguggcccacagcccacagcccac

SEQ ID NO: 423410 - RNA, 32 nt, Homo Sapiens
cugcagccugccuggguggcuguggacgaagc

SEQ ID NO: 423411 - RNA, 32 nt, Homo Sapiens
gggggucggcauguggaacucagcguguuuau

SEQ ID NO: 423412 - RNA, 32 nt, Homo Sapiens
cuuuguccaucuccugcuuucauuucaagugc

SEQ ID NO: 423413 - RNA, 32 nt, Homo Sapiens
gugcugcugcgugaagagacugagaggccucg

SEQ ID NO: 423414 - RNA, 32 nt, Homo Sapiens
aggugggcgguguuagauugugaggcacguac

SEQ ID NO: 423415 - RNA, 32 nt, Homo Sapiens
aaggcagaaagcaguguauuaagguguugaau

SEQ ID NO: 423416 - RNA, 32 nt, Homo Sapiens
cggcccggugaccgcgcggauucaggauugcg

SEQ ID NO: 423417 - RNA, 32 nt, Homo Sapiens
ggcggcagaaaaggcagcgggcgcugggagac

SEQ ID NO: 423418 - RNA, 32 nt, Homo Sapiens
cuuugaccacacgucuguccugcaggaaauga

SEQ ID NO: 423419 - RNA, 32 nt, Homo Sapiens
uuucccacauguuggauggccuuggaguggua

SEQ ID NO: 423420 - RNA, 32 nt, Homo Sapiens
ugucccucggccucggcccgggacgucuaaaa

SEQ ID NO: 423421 - RNA, 32 nt, Homo Sapiens
ggagcagaauaaauguuuuacaacuccugauu

SEQ ID NO: 423422 - RNA, 32 nt, Homo Sapiens
cuacuggugucuaugcaaauuggauuccauag

SEQ ID NO: 423423 - RNA, 32 nt, Homo Sapiens
auacugaggugauucgagaugugauaaaugug

SEQ ID NO: 423424 - RNA, 32 nt, Homo Sapiens
ucguuugcuuucuuauuuuucuuuuguuccau

SEQ ID NO: 423425 - RNA, 32 nt, Homo Sapiens
acaguaguauguaaaacccaaacaaguagaac

SEQ ID NO: 423426 - RNA, 32 nt, Homo Sapiens
ucucugaugcagggcacuugcuccacacucug

SEQ ID NO: 423427 - RNA, 32 nt, Homo Sapiens
agaguuggggcauugaggaagagauauuucug

SEQ ID NO: 423428 - RNA, 32 nt, Homo Sapiens
uuugugugauauaaaaguaguguaucauguuc

SEQ ID NO: 423429 - RNA, 32 nt, Homo Sapiens
uuggagacugguuuuuaauaucuguauauaag

SEQ ID NO: 423430 - RNA, 32 nt, Homo Sapiens
gaagguauagacaauggaauugugaguagcuu

SEQ ID NO: 423431 - RNA, 32 nt, Homo Sapiens
ggacggcagcucucaugaggacacacaggcug

SEQ ID NO: 423432 - RNA, 32 nt, Homo Sapiens
cuucucauuagcaaaagaguaauuuccaaggg

SEQ ID NO: 423433 - RNA, 32 nt, Homo Sapiens
gcaccuucuuggaguuuacaugcugguaauua

SEQ ID NO: 423434 - RNA, 32 nt, Homo Sapiens
ggacucaggggucagaagcagggacuggggca

SEQ ID NO: 423435 - RNA, 32 nt, Homo Sapiens
caguucagaugccccugagaccacccagaaau

SEQ ID NO: 423436 - RNA, 32 nt, Homo Sapiens
uccugccuuucugaaccaagccaauguauuuc

SEQ ID NO: 423437 - RNA, 32 nt, Homo Sapiens
cucuuucccugggguguccccagccagaccug

SEQ ID NO: 423438 - RNA, 32 nt, Homo Sapiens
uuugccgacucccgcggccgcggccgccggca

SEQ ID NO: 423439 - RNA, 32 nt, Homo Sapiens
ccuuuugugcugccaaauugguuuugcuagaa

SEQ ID NO: 423440 - RNA, 32 nt, Homo Sapiens
aaauaugcccucaaaauggugggggauaaaau

SEQ ID NO: 423441 - RNA, 32 nt, Homo Sapiens
ccccccauuuuuguauuacuuaagauagauua

SEQ ID NO: 423442 - RNA, 32 nt, Homo Sapiens
uccuagauauauauucaacagaaaugcaugag

SEQ ID NO: 423443 - RNA, 32 nt, Homo Sapiens
ccaaaaauauuucuggaauauuacauguugca

SEQ ID NO: 423444 - RNA, 32 nt, Homo Sapiens
cccgccccucucccggcccugcuuuuauuuau

SEQ ID NO: 423445 - RNA, 32 nt, Homo Sapiens
ccccgugggucccagcacuuccacacacucug

SEQ ID NO: 423446 - RNA, 32 nt, Homo Sapiens
uguaacuggagcucggagcugcaccgagggca

SEQ ID NO: 423447 - RNA, 32 nt, Homo Sapiens
cauuggccaauauaauuguggguuugcacaug

SEQ ID NO: 423448 - RNA, 32 nt, Homo Sapiens
uuuuguuuuuugcuguuuccagauguaucuau

SEQ ID NO: 423449 - RNA, 32 nt, Homo Sapiens
ugccccaugcccugaacaggcaugagagcucc

SEQ ID NO: 423450 - RNA, 32 nt, Homo Sapiens
uaauuuuuucuuuugcauuaccauguaaaauu

SEQ ID NO: 423451 - RNA, 32 nt, Homo Sapiens
ccacuaccucauccuggucacucagccgucgu

SEQ ID NO: 423452 - RNA, 32 nt, Homo Sapiens
cggccggcacgcgguucccagggggccagcgg

SEQ ID NO: 423453 - RNA, 32 nt, Homo Sapiens
gaaauaaagaagugcucugaaaaaauaucagc

SEQ ID NO: 423454 - RNA, 32 nt, Homo Sapiens
aauuaucacaaccuaaugacauuaauaccucu

SEQ ID NO: 423455 - RNA, 32 nt, Homo Sapiens
ggucccccaagccucccucccggguaccuggg

SEQ ID NO: 423456 - RNA, 32 nt, Homo Sapiens
gaaaucgggggucaaaguaaaauaucuuuguu

SEQ ID NO: 423457 - RNA, 32 nt, Homo Sapiens
uuuuauaaagauuguuuugagugcugauuugu

SEQ ID NO: 423458 - RNA, 32 nt, Homo Sapiens
cgccaacccuugccccaguccugcccggcccc

SEQ ID NO: 423459 - RNA, 32 nt, Homo Sapiens
ucaaggcuugcccagcugggaggccccacacg

SEQ ID NO: 423460 - RNA, 32 nt, Homo Sapiens
cacugacuuggcuccugcaccacagccugcag

SEQ ID NO: 423461 - RNA, 30 nt, Homo Sapiens
cgguggaagaugauguggauaugcuuuccc

SEQ ID NO: 423462 - RNA, 32 nt, Homo Sapiens
uucuugcggcggugcgugcuggcgccggagag

SEQ ID NO: 423463 - RNA, 32 nt, Homo Sapiens
cagguggugacgaacugggugugaggcacaca

SEQ ID NO: 423464 - RNA, 32 nt, Homo Sapiens
caaggcgcugccguaccguccaggcggcgagu

SEQ ID NO: 423465 - RNA, 32 nt, Homo Sapiens
agcaucaagcaaaaagauuauauucccaagcc

SEQ ID NO: 423466 - RNA, 32 nt, Homo Sapiens
ccuccccagacccccaggacaccugccucacc

SEQ ID NO: 423467 - RNA, 32 nt, Homo Sapiens
gcaagguccaagacuuuuuugaccaaacagua

SEQ ID NO: 423468 - RNA, 32 nt, Homo Sapiens
aaguggauuguuuuucccuaaucuuccgucaa

SEQ ID NO: 423469 - RNA, 32 nt, Homo Sapiens
uucuguuuguaaaaauaucaguuuuacuuuuc

SEQ ID NO: 423470 - RNA, 32 nt, Homo Sapiens
cugcagaaaucgaugcaacauuucuuuccugu

SEQ ID NO: 423471 - RNA, 30 nt, Homo Sapiens
gaggaaggcaggcaggagcucugucucccg

SEQ ID NO: 423472 - RNA, 32 nt, Homo Sapiens
cuggagcgcucaccccaccggcaccagugccc

SEQ ID NO: 423473 - RNA, 32 nt, Homo Sapiens
ggggaggucgggacgggcaggggcugaggacc

SEQ ID NO: 423474 - RNA, 32 nt, Homo Sapiens
uauuauggaacacuuuccuacuuaggcaguua

SEQ ID NO: 423475 - RNA, 32 nt, Homo Sapiens
ucgugugaaguguguuuuugcauuugugcauu

SEQ ID NO: 423476 - RNA, 32 nt, Homo Sapiens
gguaauuuuauuauuuaaaguccuauuaagaa

SEQ ID NO: 423477 - RNA, 32 nt, Homo Sapiens
cucugcuuucuccuccucuccucccaccaagg

SEQ ID NO: 423478 - RNA, 32 nt, Homo Sapiens
aguugguggcagcagaggcagccccaggccgg

SEQ ID NO: 423479 - RNA, 32 nt, Homo Sapiens
augggaaguagagauaaaaauauauacauuuc

SEQ ID NO: 423480 - RNA, 32 nt, Homo Sapiens
aucccgggacccgacgggccgcggcgcggagg

SEQ ID NO: 423481 - RNA, 32 nt, Homo Sapiens
uacuguuuguauauauuguauauauuaaaaca

SEQ ID NO: 423482 - RNA, 32 nt, Homo Sapiens
aacugauaguacauugccaucuccaggaagac

SEQ ID NO: 423483 - RNA, 32 nt, Homo Sapiens
aacccgggagacggagcuugcaguaagccgag

SEQ ID NO: 423484 - RNA, 32 nt, Homo Sapiens
aggucacguacauuuucauauuagacuuuuug

SEQ ID NO: 423485 - RNA, 32 nt, Homo Sapiens
aguaaccugcugcaggucacacagcaaugcag

SEQ ID NO: 423486 - RNA, 32 nt, Homo Sapiens
uuccuuaggaggcccccuccucacgcuagagu

SEQ ID NO: 423487 - RNA, 32 nt, Homo Sapiens
auugaugccagagaacacaaacgcuucaggag

SEQ ID NO: 423488 - RNA, 32 nt, Homo Sapiens
gaagccagagggugggaggggccaugcugugu

SEQ ID NO: 423489 - RNA, 32 nt, Homo Sapiens
cccugcuguucucagcagccacuucccaggcu

SEQ ID NO: 423490 - RNA, 32 nt, Homo Sapiens
aagauaugaugaauauuaaugcagaggccucu

SEQ ID NO: 423491 - RNA, 32 nt, Homo Sapiens
gcuuuuuugguaccacgagacccggcccucug

SEQ ID NO: 423492 - RNA, 32 nt, Homo Sapiens
cagcggucggcauggcagcugcuaccucgcug

SEQ ID NO: 423493 - RNA, 32 nt, Homo Sapiens
aauuguacuuuuuuaaaaguguguguccucug

SEQ ID NO: 423494 - RNA, 32 nt, Homo Sapiens
acacaucagagcuggcuggcccggggcugcag

SEQ ID NO: 423495 - RNA, 32 nt, Homo Sapiens
gcaugccucuucccuucccuggagagaaagug

SEQ ID NO: 423496 - RNA, 30 nt, Homo Sapiens
gggccgggcgggaagucgggucccgaggcu

SEQ ID NO: 423497 - RNA, 32 nt, Homo Sapiens
gccugggaacgcucggcccccggcagccgaga

SEQ ID NO: 423498 - RNA, 32 nt, Homo Sapiens
cucggcgagcccagcuggccgcgcuccaggug

SEQ ID NO: 423499 - RNA, 32 nt, Homo Sapiens
ucuaaacaaacaaacaaacaaacaaacaaaua

SEQ ID NO: 423500 - RNA, 32 nt, Homo Sapiens
cccuccagccucagccaagcaacaugggguga

SEQ ID NO: 423501 - RNA, 32 nt, Homo Sapiens
gaaaagagguaucucacagguaaugaggaggc

SEQ ID NO: 423502 - RNA, 32 nt, Homo Sapiens
auccaggaugagaucagaaggauacugguguu

SEQ ID NO: 423503 - RNA, 32 nt, Homo Sapiens
aaccaaaguacuuuuggugucauuauuccauc

SEQ ID NO: 423504 - RNA, 32 nt, Homo Sapiens
gggucucagcaauucuguggcagcacauagac

SEQ ID NO: 423505 - RNA, 32 nt, Homo Sapiens
ucuaaauaaauaaauaaacaaacaaauaaaua

SEQ ID NO: 423506 - RNA, 32 nt, Homo Sapiens
gacuugcuccuaauguugaauuuugaugaaca

SEQ ID NO: 423507 - RNA, 32 nt, Homo Sapiens
uccacuguucaaccgauuccuuccgcuuucuu

SEQ ID NO: 423508 - RNA, 32 nt, Homo Sapiens
gcugccgguagcaagccgacugagggaaggug

SEQ ID NO: 423509 - RNA, 32 nt, Homo Sapiens
gcuccccccucccccaccguuuuagagagcua

SEQ ID NO: 423510 - RNA, 32 nt, Homo Sapiens
acccuuuucuuuucuuuuuugaaaaguccaag

SEQ ID NO: 423511 - RNA, 32 nt, Homo Sapiens
uucacgucuucagacuuucuugccaagacuca

SEQ ID NO: 423512 - RNA, 32 nt, Homo Sapiens
uauuagagcugggcauucuccucccccggcag

SEQ ID NO: 423513 - RNA, 32 nt, Homo Sapiens
gguuugagaaaaugcccacagauuguuggaua

SEQ ID NO: 423514 - RNA, 32 nt, Homo Sapiens
gcagcgggcccagccgccccccagguggccuc

SEQ ID NO: 423515 - RNA, 32 nt, Homo Sapiens
gaaguguuacuggugccuggaacugaggggag

SEQ ID NO: 423516 - RNA, 32 nt, Homo Sapiens
gucaugaugucuuuuaccauuugauaauuuua

SEQ ID NO: 423517 - RNA, 29 nt, Homo Sapiens
uaugcugugacuucuuguuuaaguuuguc

SEQ ID NO: 423518 - RNA, 32 nt, Homo Sapiens
auaagacaggaugaagacaugcuugaggagcc

SEQ ID NO: 423519 - RNA, 32 nt, Homo Sapiens
gccacugcacuccagacugggcgacagagucu

SEQ ID NO: 423520 - RNA, 32 nt, Homo Sapiens
cuuucuguggcaacuucugguuuucugacagu

SEQ ID NO: 423521 - RNA, 32 nt, Homo Sapiens
ggaaaagucugcuuguaagcugguugaaaaag

SEQ ID NO: 423522 - RNA, 32 nt, Homo Sapiens
auauuuacaacacuuuaauggguuuuuuaaaa

SEQ ID NO: 423523 - RNA, 32 nt, Homo Sapiens
uuguggguggauguuauuaacugucauuguug

SEQ ID NO: 423524 - RNA, 32 nt, Homo Sapiens
cacacccaguauuugcagaagggcaaagcugc

SEQ ID NO: 423525 - RNA, 32 nt, Homo Sapiens
uacauaaucauuaaaaucugagggaucauugc

SEQ ID NO: 423526 - RNA, 32 nt, Homo Sapiens
agaagcggcagagccggccacacagugcaggg

SEQ ID NO: 423527 - RNA, 32 nt, Homo Sapiens
auacauuuuaaugccaugaaagaauaugcugu

SEQ ID NO: 423528 - RNA, 32 nt, Homo Sapiens
cugccucuguucuccuuucugacccacuggga

SEQ ID NO: 423529 - RNA, 32 nt, Homo Sapiens
uuacacugagcuucuuucauuaucucauaugc

SEQ ID NO: 423530 - RNA, 32 nt, Homo Sapiens
auauacgauuauuauugacuacaggguuauuu

SEQ ID NO: 423531 - RNA, 32 nt, Homo Sapiens
caacaacauuuuaaauguauuuuguuauguuu

SEQ ID NO: 423532 - RNA, 32 nt, Homo Sapiens
aagucuuuggggaaauuaaggaucuuugaagc

SEQ ID NO: 423533 - RNA, 32 nt, Homo Sapiens
aagguuuauagagaccuagagauacagcaucu

SEQ ID NO: 423534 - RNA, 32 nt, Homo Sapiens
agcacuaucuucuccccauuuauuaauucaca

SEQ ID NO: 423535 - RNA, 32 nt, Homo Sapiens
gagaagcaugacaaacaaaaucauuuaccuaa

SEQ ID NO: 423536 - RNA, 32 nt, Homo Sapiens
ggaccuuuuggaaugacuggggagggcugcag

SEQ ID NO: 423537 - RNA, 32 nt, Homo Sapiens
agcccccacagugaggaaaugugugaggcacc

SEQ ID NO: 423538 - RNA, 32 nt, Homo Sapiens
acugcaaguauuugauaauaucccugucccca

SEQ ID NO: 423539 - RNA, 32 nt, Homo Sapiens
aucucgucuucagugugccgcucaguucccug

SEQ ID NO: 423540 - RNA, 32 nt, Homo Sapiens
ugcucuggugccugguggugcuagcuccuccc

SEQ ID NO: 423541 - RNA, 32 nt, Homo Sapiens
agcagaugaccccuucucccccgucugugccc

SEQ ID NO: 423542 - RNA, 32 nt, Homo Sapiens
aaaauguauaagucaucucacuuuuugucaag

SEQ ID NO: 423543 - RNA, 32 nt, Homo Sapiens
gccugccagaagcuggaggggugcuggagacc

SEQ ID NO: 423544 - RNA, 32 nt, Homo Sapiens
caaagaaaucaucuuagaacugucaagcauau

SEQ ID NO: 423545 - RNA, 30 nt, Homo Sapiens
gccgaagagaagcuuugagaccaagaaaug

SEQ ID NO: 423546 - RNA, 32 nt, Homo Sapiens
gaaaaggugcccagcccccaccacuccucagc

SEQ ID NO: 423547 - RNA, 31 nt, Homo Sapiens
gugaauuugugcuuaagucaaugaaugugua

SEQ ID NO: 423548 - RNA, 32 nt, Homo Sapiens
gcuccucagagguaggugcucccucaggauca

SEQ ID NO: 423549 - RNA, 32 nt, Homo Sapiens
cgccaggccgcuuccaggaagccccgggccag

SEQ ID NO: 423550 - RNA, 32 nt, Homo Sapiens
gguggaacccucacaaaugggauuagagacac

SEQ ID NO: 423551 - RNA, 32 nt, Homo Sapiens
acuggauuccaagggcgaguauagagagugag

SEQ ID NO: 423552 - RNA, 32 nt, Homo Sapiens
uauauuauuucacauauauaaaacagauguua

SEQ ID NO: 423553 - RNA, 32 nt, Homo Sapiens
ccccaggccaagggcgaugggccccugagccc

SEQ ID NO: 423554 - RNA, 32 nt, Homo Sapiens
gcagcuacuguguggccggcccggggccagcg

SEQ ID NO: 423555 - RNA, 32 nt, Homo Sapiens
aggcauccuggguuauuuuacaaacucaugga

SEQ ID NO: 423556 - RNA, 32 nt, Homo Sapiens
auaauaaaucaucucaucacaaaucaauacgg

SEQ ID NO: 423557 - RNA, 32 nt, Homo Sapiens
cuguccugcgcccgcgcgccccgggagccuac

SEQ ID NO: 423558 - RNA, 32 nt, Homo Sapiens
uaauacuguagaggagaaaaauguagaaauua

SEQ ID NO: 423559 - RNA, 32 nt, Homo Sapiens
gcagagagauuaguucaaggcuaacauuuuau

SEQ ID NO: 423560 - RNA, 30 nt, Homo Sapiens
gguccagguuuugaugugggucccguaaag

SEQ ID NO: 423561 - RNA, 32 nt, Homo Sapiens
gcaacuuugaauagaaguguuucagacauagg

SEQ ID NO: 423562 - RNA, 32 nt, Homo Sapiens
gacuggagauguuugugaagauaccuucaaag

SEQ ID NO: 423563 - RNA, 32 nt, Homo Sapiens
acugugagggcuucuccagggggcacccuuug

SEQ ID NO: 423564 - RNA, 32 nt, Homo Sapiens
cccaccccgcgccggcggccauggcaggcacc

SEQ ID NO: 423565 - RNA, 32 nt, Homo Sapiens
cugaggucaggaguucgagaccagucuggccc

SEQ ID NO: 423566 - RNA, 32 nt, Homo Sapiens
cccggccacgucugugcucuguccuuguguaa

SEQ ID NO: 423567 - RNA, 32 nt, Homo Sapiens
gugugaacuauugagaagaucggaacagcucc

SEQ ID NO: 423568 - RNA, 32 nt, Homo Sapiens
gcuauaggugcuacaaaaacacagcaagggug

SEQ ID NO: 423569 - RNA, 32 nt, Homo Sapiens
ucgggcucggaacgagacugcacggauuguuu

SEQ ID NO: 423570 - RNA, 32 nt, Homo Sapiens
gugucugauguauucgggaggcuuaggugugc

SEQ ID NO: 423571 - RNA, 32 nt, Homo Sapiens
cacgcccggcacagcucacuuuucaauggugg

SEQ ID NO: 423572 - RNA, 32 nt, Homo Sapiens
cauuaccgcaugcuggggucauugggggaggg

SEQ ID NO: 423573 - RNA, 32 nt, Homo Sapiens
cagaagggaaaauggaugauaagaaagaggac

SEQ ID NO: 423574 - RNA, 32 nt, Homo Sapiens
gagaaaggacuuaugagugcugucaaucuggg

SEQ ID NO: 423575 - RNA, 27 nt, Homo Sapiens
accuccuuuucccucagccccaauauc

SEQ ID NO: 423576 - RNA, 32 nt, Homo Sapiens
uggcuaauuuuuuguauuuuuuguagagaugg

SEQ ID NO: 423577 - RNA, 32 nt, Homo Sapiens
cuagcugaguugucucuguccacacauuauca

SEQ ID NO: 423578 - RNA, 32 nt, Homo Sapiens
gcucgacggcggugcgcuggcggcgaguguau

SEQ ID NO: 423579 - RNA, 32 nt, Homo Sapiens
ggcugcugccccagcccgcgccagacagccca

SEQ ID NO: 423580 - RNA, 32 nt, Homo Sapiens
guuagagagauuggccagcaaaaacuguggga

SEQ ID NO: 423581 - RNA, 28 nt, Homo Sapiens
gucaaaagagauuaacauuugagucggu

SEQ ID NO: 423582 - RNA, 32 nt, Homo Sapiens
uuggagggcuggggagugucaugggggugggg

SEQ ID NO: 423583 - RNA, 32 nt, Homo Sapiens
guggcugugcucauggaugcugauuugacaau

SEQ ID NO: 423584 - RNA, 32 nt, Homo Sapiens
gcagguagugcagcugcugggcgucuccugcg

SEQ ID NO: 423585 - RNA, 32 nt, Homo Sapiens
auuucuucacaaggcaguaauuccuuugaacu

SEQ ID NO: 423586 - RNA, 32 nt, Homo Sapiens
cuaagagguaaggcauuggagaaggacaaugu

SEQ ID NO: 423587 - RNA, 32 nt, Homo Sapiens
aguucuugacaguccaggaggcgccuggugca

SEQ ID NO: 423588 - RNA, 32 nt, Homo Sapiens
ucacauuuucaauaaugagguaaucauguuac

SEQ ID NO: 423589 - RNA, 32 nt, Homo Sapiens
gcugcccaaccgccagccccagccccgcgcug

SEQ ID NO: 423590 - RNA, 32 nt, Homo Sapiens
cauucauucaacaaaauuuggcuggaaaaaaa

SEQ ID NO: 423591 - RNA, 32 nt, Homo Sapiens
agggcagcggcucggcccugcugcuggcccgg

SEQ ID NO: 423592 - RNA, 32 nt, Homo Sapiens
cagagacugggcggcccggcgggggcucccug

SEQ ID NO: 423593 - RNA, 32 nt, Homo Sapiens
ugauuauuuucuacacauacauguaaaauaug

SEQ ID NO: 423594 - RNA, 32 nt, Homo Sapiens
ggcgaggauggacgcacagaccuggcccgugg

SEQ ID NO: 423595 - RNA, 32 nt, Homo Sapiens
agggauacacgguguguguggauugucagccu

SEQ ID NO: 423596 - RNA, 32 nt, Homo Sapiens
aaagccuaaugaugacgcuuguccccagagcc

SEQ ID NO: 423597 - RNA, 32 nt, Homo Sapiens
accaggagucuuggggucuucucuggggcagc

SEQ ID NO: 423598 - RNA, 32 nt, Homo Sapiens
uggccagcgggaaggggggccgccgccgccuc

SEQ ID NO: 423599 - RNA, 32 nt, Homo Sapiens
cacaaaaucaguacaucagacacaccaugaaa

SEQ ID NO: 423600 - RNA, 32 nt, Homo Sapiens
aguguccucugaugaaugaauggacagaggaa

SEQ ID NO: 423601 - RNA, 32 nt, Homo Sapiens
ccugacauuauaagagccgaguagcccucugg

SEQ ID NO: 423602 - RNA, 32 nt, Homo Sapiens
aggaagagcagacagaggcacagcaggagacc

SEQ ID NO: 423603 - RNA, 32 nt, Homo Sapiens
uccucugccugccucaguuuaauuauuuuggc

SEQ ID NO: 423604 - RNA, 32 nt, Homo Sapiens
gaaggcggcggccaagaugcgcuccgucacgu

SEQ ID NO: 423605 - RNA, 32 nt, Homo Sapiens
gcucuguuccccacccaaaucccaucucaauu

SEQ ID NO: 423606 - RNA, 32 nt, Homo Sapiens
uggcuucucccgacccucuggcugccccggug

SEQ ID NO: 423607 - RNA, 32 nt, Homo Sapiens
agagguugcccguggcuuuugcagcucuggac

SEQ ID NO: 423608 - RNA, 32 nt, Homo Sapiens
gcuggagugcaauggcgcgaaccuggcucacu

SEQ ID NO: 423609 - RNA, 32 nt, Homo Sapiens
acuaaauguuucucuaaguuuaauuuucuagc

SEQ ID NO: 423610 - RNA, 32 nt, Homo Sapiens
cggcggcugcgaacaccuugaggacgggucgc

SEQ ID NO: 423611 - RNA, 32 nt, Homo Sapiens
aucuaccucacagcagugucagaaggacuucg

SEQ ID NO: 423612 - RNA, 32 nt, Homo Sapiens
aagcggcugccagcucugaaucuuuaacugaa

SEQ ID NO: 423613 - RNA, 32 nt, Homo Sapiens
acuuuacccaaguggauuuggggagcagaaau

SEQ ID NO: 423614 - RNA, 32 nt, Homo Sapiens
auaucuucuggugaaggaaauuaaugauguaa

SEQ ID NO: 423615 - RNA, 32 nt, Homo Sapiens
ggccuggcauuuggaaucacaggauuuaucau

SEQ ID NO: 423616 - RNA, 32 nt, Homo Sapiens
gccagcuauugccaagaagaaaauaguugaug

SEQ ID NO: 423617 - RNA, 32 nt, Homo Sapiens
ggcagaggccaacggaucccccugccugucgc

SEQ ID NO: 423618 - RNA, 32 nt, Homo Sapiens
uuucuaacccucagaaguuuuaagauggcauc

SEQ ID NO: 423619 - RNA, 32 nt, Homo Sapiens
aauuggggacaguaaauguauggggucgcagg

SEQ ID NO: 423620 - RNA, 32 nt, Homo Sapiens
caucucaucuucugucacuaaauacccacucu

SEQ ID NO: 423621 - RNA, 32 nt, Homo Sapiens
agaagagagggcugggcggggaggagcugcua

SEQ ID NO: 423622 - RNA, 31 nt, Homo Sapiens
ggccucucacggagacuuucccaccagugua

SEQ ID NO: 423623 - RNA, 32 nt, Homo Sapiens
cucacugcaaccuccgccucccagguucaaga

SEQ ID NO: 423624 - RNA, 32 nt, Homo Sapiens
agcacaaucuggccucccgguacggauagaga

SEQ ID NO: 423625 - RNA, 32 nt, Homo Sapiens
uaagcucacaaauagugauuauuuucaaaaga

SEQ ID NO: 423626 - RNA, 32 nt, Homo Sapiens
ugggagugaugacuacuugucuucuuagcacu

SEQ ID NO: 423627 - RNA, 32 nt, Homo Sapiens
uaagacuuucccuuucaucuuuguguucaucu

SEQ ID NO: 423628 - RNA, 32 nt, Homo Sapiens
cccugcagggaugacuucugcacuuugccguc

SEQ ID NO: 423629 - RNA, 32 nt, Homo Sapiens
uugccuaccucacauuaugaaaacacuauucu

SEQ ID NO: 423630 - RNA, 32 nt, Homo Sapiens
aagcgggcgggggcggggugugaggcgcugcg

SEQ ID NO: 423631 - RNA, 32 nt, Homo Sapiens
accugcagccccaggccucccucccccggggu

SEQ ID NO: 423632 - RNA, 32 nt, Homo Sapiens
cugggcugguggccccuggcuccggagaaugc

SEQ ID NO: 423633 - RNA, 32 nt, Homo Sapiens
ugggcuucacuggcagagcuggguacugcugu

SEQ ID NO: 423634 - RNA, 32 nt, Homo Sapiens
acaaacuuccaaaaauacccuuaagacuguga

SEQ ID NO: 423635 - RNA, 32 nt, Homo Sapiens
aacugggggccgggcgcguggcucacgccugu

SEQ ID NO: 423636 - RNA, 32 nt, Homo Sapiens
gaaauaaauuuauaagagacuuuauuuaaaga

SEQ ID NO: 423637 - RNA, 32 nt, Homo Sapiens
gaagcacauuuucuccgugucauguaauuuuu

SEQ ID NO: 423638 - RNA, 32 nt, Homo Sapiens
uaauguuucccucaagaacaaacagaaacgag

SEQ ID NO: 423639 - RNA, 32 nt, Homo Sapiens
aauuuuauacagauuauaugagggauaagaua

SEQ ID NO: 423640 - RNA, 32 nt, Homo Sapiens
uuggcucgcucgcacacccccucccgcuacag

SEQ ID NO: 423641 - RNA, 32 nt, Homo Sapiens
uguaacucauaaaaucagcauccaccacaaua

SEQ ID NO: 423642 - RNA, 32 nt, Homo Sapiens
cugugaagccccagggaauggcugcacuucaa

SEQ ID NO: 423643 - RNA, 30 nt, Homo Sapiens
ccugaugugaugccucucugguaugggcug

SEQ ID NO: 423644 - RNA, 32 nt, Homo Sapiens
uuccaggugaauaacuaacaaggugguggguc

SEQ ID NO: 423645 - RNA, 32 nt, Homo Sapiens
uuugauuuuaguacaaaccuuaauuucucaga

SEQ ID NO: 423646 - RNA, 32 nt, Homo Sapiens
auacccauaugcaaaacuguguuuccuugcau

SEQ ID NO: 423647 - RNA, 32 nt, Homo Sapiens
cagccucagugucaagggcccgcccacugacc

SEQ ID NO: 423648 - RNA, 32 nt, Homo Sapiens
uugaugucaguuccaauuauuuggcaucaaaa

SEQ ID NO: 423649 - RNA, 32 nt, Homo Sapiens
uuccucgagcgcgggguggggcuucgggaccc

SEQ ID NO: 423650 - RNA, 32 nt, Homo Sapiens
auucuagcccaagucugguagagcagucgggc

SEQ ID NO: 423651 - RNA, 32 nt, Homo Sapiens
gaaaguggugcuuaauguagacuauagaauga

SEQ ID NO: 423652 - RNA, 32 nt, Homo Sapiens
ccuggcaggcaaccaaccaaaaaacaaacaaa

SEQ ID NO: 423653 - RNA, 32 nt, Homo Sapiens
gcuacuagacugcccccggacccugcgaugau

SEQ ID NO: 423654 - RNA, 32 nt, Homo Sapiens
gcaagaaguggaagaguagguggcuggugcug

SEQ ID NO: 423655 - RNA, 32 nt, Homo Sapiens
uauccacaguagacaaaauagcacuaauccag

SEQ ID NO: 423656 - RNA, 32 nt, Homo Sapiens
aagcucagcagggcugugcuuggcucacagga

SEQ ID NO: 423657 - RNA, 32 nt, Homo Sapiens
uaucagaaauuccaaagggcauuuaugugagg

SEQ ID NO: 423658 - RNA, 32 nt, Homo Sapiens
agcaggcgcaggcuccgugaggaggcaagguu

SEQ ID NO: 423659 - RNA, 32 nt, Homo Sapiens
cucugcuggaaagggacacacccagcugucug

SEQ ID NO: 423660 - RNA, 32 nt, Homo Sapiens
cuacaaaaaaagacaguauagagucucauaaa

SEQ ID NO: 423661 - RNA, 32 nt, Homo Sapiens
cuuucuauaaguacagagugaaauaaaaguga

SEQ ID NO: 423662 - RNA, 32 nt, Homo Sapiens
ccaacauuccaaggugcagccuguguauaagg

SEQ ID NO: 423663 - RNA, 32 nt, Homo Sapiens
accuggcugaagaucugcagccucagagccuc

SEQ ID NO: 423664 - RNA, 32 nt, Homo Sapiens
aggcagccgcccgaugaacaccucugacccag

SEQ ID NO: 423665 - RNA, 32 nt, Homo Sapiens
gccucgacucugcuaccaccgugcgcucucug

SEQ ID NO: 423666 - RNA, 32 nt, Homo Sapiens
gugcaccuuguacuauuucacaauggguucug

SEQ ID NO: 423667 - RNA, 32 nt, Homo Sapiens
gcauucaucacagauagugggagguacaaguc

SEQ ID NO: 423668 - RNA, 32 nt, Homo Sapiens
acaaacaaggacucucuguauaagguacuggu

SEQ ID NO: 423669 - RNA, 32 nt, Homo Sapiens
ccauauucuguaguauuuuucuuuguauauuu

SEQ ID NO: 423670 - RNA, 28 nt, Homo Sapiens
gcucgggggcggcugcacguggccgugg

SEQ ID NO: 423671 - RNA, 32 nt, Homo Sapiens
guucaggaauggggaccugguaagucccccau

SEQ ID NO: 423672 - RNA, 32 nt, Homo Sapiens
uuaacuuacagagaagcaggcaagaugaccuu

SEQ ID NO: 423673 - RNA, 32 nt, Homo Sapiens
cuggagccucacucacucggaagugcuuggaa

SEQ ID NO: 423674 - RNA, 32 nt, Homo Sapiens
aacuuauacuuugaguuucauaugaaauugaa

SEQ ID NO: 423675 - RNA, 32 nt, Homo Sapiens
acugcagcaguaccuggcaugugggagugccc

SEQ ID NO: 423676 - RNA, 32 nt, Homo Sapiens
uccucuccaggcccccuccccaucccaccccc

SEQ ID NO: 423677 - RNA, 32 nt, Homo Sapiens
uucuccuugugcuuuccuauggaaaaaauaca

SEQ ID NO: 423678 - RNA, 32 nt, Homo Sapiens
cauacuuaaugaucaacaaguauggugugaga

SEQ ID NO: 423679 - RNA, 32 nt, Homo Sapiens
cgccugcacccacaggcauggccgagcacaug

SEQ ID NO: 423680 - RNA, 32 nt, Homo Sapiens
aauauaauugugaaggagucagggcuaacacc

SEQ ID NO: 423681 - RNA, 32 nt, Homo Sapiens
uccacccucagggccuggccacgggguccugg

SEQ ID NO: 423682 - RNA, 32 nt, Homo Sapiens
cuucucuguucaguagcaaaagcaaacacucg

SEQ ID NO: 423683 - RNA, 32 nt, Homo Sapiens
agcccgcagccggccgcgucaugccaggcgcu

SEQ ID NO: 423684 - RNA, 32 nt, Homo Sapiens
agaacuugggcuuaaaucaugggcuaucucuc

SEQ ID NO: 423685 - RNA, 32 nt, Homo Sapiens
agaaggugaagcagcagacggcugugucggag

SEQ ID NO: 423686 - RNA, 32 nt, Homo Sapiens
cuccugccuuaggucugaggcccugucugaag

SEQ ID NO: 423687 - RNA, 32 nt, Homo Sapiens
aucuagugcuauauuucuaccuccucauuugu

SEQ ID NO: 423688 - RNA, 32 nt, Homo Sapiens
ccccuccguuugcucugggcaaaacuucgaga

SEQ ID NO: 423689 - RNA, 32 nt, Homo Sapiens
ucuguggcacagcaccaagcucugccagcacc

SEQ ID NO: 423690 - RNA, 32 nt, Homo Sapiens
gccuccugcgcuccugccgccgggacccucga

SEQ ID NO: 423691 - RNA, 32 nt, Homo Sapiens
agcuuuauuguuaaacuuugcuauuuaaaauu

SEQ ID NO: 423692 - RNA, 32 nt, Homo Sapiens
gagcucacugucaucgcgcauccacuugaacu

SEQ ID NO: 423693 - RNA, 32 nt, Homo Sapiens
acaugguaccugaguucugcuuccuuggaugu

SEQ ID NO: 423694 - RNA, 32 nt, Homo Sapiens
ugcauaaauuuauggcaaaaacuuaaaaaaca

SEQ ID NO: 423695 - RNA, 29 nt, Homo Sapiens
caguggaggggacaguggaggcuggagcu

SEQ ID NO: 423696 - RNA, 32 nt, Homo Sapiens
ugagugaagacuccauugugggacaucuaggu

SEQ ID NO: 423697 - RNA, 32 nt, Homo Sapiens
aaggaagcugagagccuaugauuacggucuuc

SEQ ID NO: 423698 - RNA, 32 nt, Homo Sapiens
cuaaugcuuuuuuuuucuuaagaguuauggga

SEQ ID NO: 423699 - RNA, 32 nt, Homo Sapiens
aaaucucuucugucacacacagaugaacuuua

SEQ ID NO: 423700 - RNA, 32 nt, Homo Sapiens
agaguuuuacuuuagauuaacuaaauauugcc

SEQ ID NO: 423701 - RNA, 32 nt, Homo Sapiens
acuaucccaggauucccgacucccgguuuccu

SEQ ID NO: 423702 - RNA, 32 nt, Homo Sapiens
ggauauucuucaucagaagcuuuaaucaaaga

SEQ ID NO: 423703 - RNA, 32 nt, Homo Sapiens
augccuucucugauacuuuugaaacagaugug

SEQ ID NO: 423704 - RNA, 32 nt, Homo Sapiens
auacaagucaaucuuacuauauguaacuucag

SEQ ID NO: 423705 - RNA, 32 nt, Homo Sapiens
ucaauuuguuuuuucuuauagagaaaaugagu

SEQ ID NO: 423706 - RNA, 32 nt, Homo Sapiens
agugccugcuccugccauggggcccgcgggga

SEQ ID NO: 423707 - RNA, 32 nt, Homo Sapiens
caguccgcagucuggccugggcgacagagcga

SEQ ID NO: 423708 - RNA, 32 nt, Homo Sapiens
ucaagaaaauuugguagggauuuuaaaaaggu

SEQ ID NO: 423709 - RNA, 32 nt, Homo Sapiens
cucuugcccucccgaaggccccaguccagccu

SEQ ID NO: 423710 - RNA, 32 nt, Homo Sapiens
aauauauaagacuuuacccauguuauuuucuu

SEQ ID NO: 423711 - RNA, 32 nt, Homo Sapiens
gugguguucaccuuuaaucccagcuacuuggg

SEQ ID NO: 423712 - RNA, 31 nt, Homo Sapiens
ugggugcagcgcaccagcguggcacauguau

SEQ ID NO: 423713 - RNA, 31 nt, Homo Sapiens
uaaacagcgcggucagcgacggccucaccua

SEQ ID NO: 423714 - RNA, 32 nt, Homo Sapiens
caagacaguauuuuaaaaauaaggucaaaugc

SEQ ID NO: 423715 - RNA, 32 nt, Homo Sapiens
gucuuuguauuuauuucuuuuggggucauaga

SEQ ID NO: 423716 - RNA, 32 nt, Homo Sapiens
ucuguacuuugaaagaggccuuugaaaaacaa

SEQ ID NO: 423717 - RNA, 32 nt, Homo Sapiens
cuggagccgggcggcgcgccgcgccccugaac

SEQ ID NO: 423718 - RNA, 32 nt, Homo Sapiens
aagauuuuagugaagcaggaaacuaccuaaaa

SEQ ID NO: 423719 - RNA, 32 nt, Homo Sapiens
cuugugauaaaaccuccuuaaaucuguucaga

SEQ ID NO: 423720 - RNA, 32 nt, Homo Sapiens
ucaccgaggagcucuggcaggcugcccugagc

SEQ ID NO: 423721 - RNA, 32 nt, Homo Sapiens
gucccucugccuccccggaagaagaugaggaa

SEQ ID NO: 423722 - RNA, 32 nt, Homo Sapiens
aagacaaacccagcugcagaucaugcuuuucu

SEQ ID NO: 423723 - RNA, 32 nt, Homo Sapiens
cugaccagggagugacagguuaugacauuucc

SEQ ID NO: 423724 - RNA, 32 nt, Homo Sapiens
uuauauacuuuuucaugaaaauggaguuauca

SEQ ID NO: 423725 - RNA, 32 nt, Homo Sapiens
auugccccgccggggccggcccgcgggaucag

SEQ ID NO: 423726 - RNA, 32 nt, Homo Sapiens
acucagcagagauggccauauuaaacacguuu

SEQ ID NO: 423727 - RNA, 32 nt, Homo Sapiens
uccgggccgggcgcacuaaggugcgcggcccc

SEQ ID NO: 423728 - RNA, 32 nt, Homo Sapiens
gauugauauuaagccagaaccagaugaucuca

SEQ ID NO: 423729 - RNA, 32 nt, Homo Sapiens
aucguuugauccaacccucuuauuuucagagg

SEQ ID NO: 423730 - RNA, 32 nt, Homo Sapiens
cuuagagugcucacuuacuaccucugaacaau

SEQ ID NO: 423731 - RNA, 32 nt, Homo Sapiens
accaaaacaauauuuagaacuaucaagugauc

SEQ ID NO: 423732 - RNA, 32 nt, Homo Sapiens
caguuguuggagccccacccugggcugccucu

SEQ ID NO: 423733 - RNA, 32 nt, Homo Sapiens
ggaacggguguggaaggaggcggggcaaaggu

SEQ ID NO: 423734 - RNA, 32 nt, Homo Sapiens
uccagauuuuugguuuugauccuacacauuua

SEQ ID NO: 423735 - RNA, 32 nt, Homo Sapiens
ggacugguuugggcagaauauuaaacuuauuu

SEQ ID NO: 423736 - RNA, 32 nt, Homo Sapiens
uacguggacuggcuuggugccuugguccaugu

SEQ ID NO: 423737 - RNA, 32 nt, Homo Sapiens
gggucaucacugggcugcgggcaccacgcggg

SEQ ID NO: 423738 - RNA, 32 nt, Homo Sapiens
ggccccaagauguuggggggccccacggagag

SEQ ID NO: 423739 - RNA, 32 nt, Homo Sapiens
acacgucaaggaacuugugucuggaaauggaa

SEQ ID NO: 423740 - RNA, 32 nt, Homo Sapiens
ccacagucaucagauuauucuaucacaggguc

SEQ ID NO: 423741 - RNA, 32 nt, Homo Sapiens
auggauuuuucguguugaugcugcugguucug

SEQ ID NO: 423742 - RNA, 32 nt, Homo Sapiens
cugagaaacaacagaaaagggaaggucagccc

SEQ ID NO: 423743 - RNA, 32 nt, Homo Sapiens
gggucucucagugaggagcugcugcugugcug

SEQ ID NO: 423744 - RNA, 32 nt, Homo Sapiens
cugcagagcuaccccaccucugggccuggcca

SEQ ID NO: 423745 - RNA, 32 nt, Homo Sapiens
ugcacagacgggcgggcgucacguguguucag

SEQ ID NO: 423746 - RNA, 32 nt, Homo Sapiens
gacccuggcagagcuggcgcaaacagggcgag

SEQ ID NO: 423747 - RNA, 32 nt, Homo Sapiens
ccccuagaauaacauuuggugccucgcagagu

SEQ ID NO: 423748 - RNA, 32 nt, Homo Sapiens
agugugggcuccugcagugggcgcgggucacg

SEQ ID NO: 423749 - RNA, 32 nt, Homo Sapiens
gcccacccagaccggcugcugcgcccccuccu

SEQ ID NO: 423750 - RNA, 32 nt, Homo Sapiens
guucauccugagcuuuucuccucaugagcuga

SEQ ID NO: 423751 - RNA, 32 nt, Homo Sapiens
uaaaaugcaauaauaagcaaauaaauuacuuu

SEQ ID NO: 423752 - RNA, 32 nt, Homo Sapiens
gaaacagguuaucagugaaaaguuaauuaugg

SEQ ID NO: 423753 - RNA, 32 nt, Homo Sapiens
guguauuuauuuuuccaggaauuaaaaaacau

SEQ ID NO: 423754 - RNA, 32 nt, Homo Sapiens
guuuguaaugaaagucuacagccaauuuuacu

SEQ ID NO: 423755 - RNA, 32 nt, Homo Sapiens
aagaguuuuaacuacuugucucucuuuugcua

SEQ ID NO: 423756 - RNA, 32 nt, Homo Sapiens
cggcccuuugaugauagcacauggcgcaggac

SEQ ID NO: 423757 - RNA, 28 nt, Homo Sapiens
uuccaggggcggccggauguggccugcc

SEQ ID NO: 423758 - RNA, 32 nt, Homo Sapiens
acaucaagcaggaaacagacgacuggccuucc

SEQ ID NO: 423759 - RNA, 32 nt, Homo Sapiens
caccuccacgugccacuggggcuguaaggagg

SEQ ID NO: 423760 - RNA, 32 nt, Homo Sapiens
cccuucuuucccuccgcgccccgcccccgagg

SEQ ID NO: 423761 - RNA, 32 nt, Homo Sapiens
uaggaccucagauccuuugauagugcaguuau

SEQ ID NO: 423762 - RNA, 32 nt, Homo Sapiens
ggcggggacgcgguugacccaggccgcauacu

SEQ ID NO: 423763 - RNA, 32 nt, Homo Sapiens
cuuucucaccaguggagaaacacacacaucaa

SEQ ID NO: 423764 - RNA, 29 nt, Homo Sapiens
aagaaaugauauuuauauucucuauaggg

SEQ ID NO: 423765 - RNA, 32 nt, Homo Sapiens
aacggcgccugccuggggucagcccucgucac

SEQ ID NO: 423766 - RNA, 31 nt, Homo Sapiens
caaauguuuagcaucauagugcuguuucaga

SEQ ID NO: 423767 - RNA, 32 nt, Homo Sapiens
auucuauugguuuuuuuuuuuaaacagaugga

SEQ ID NO: 423768 - RNA, 32 nt, Homo Sapiens
ccccacuggcugccugggagccccacaccacc

SEQ ID NO: 423769 - RNA, 32 nt, Homo Sapiens
acaagcaugaagauggcauauuugaugucacu

SEQ ID NO: 423770 - RNA, 32 nt, Homo Sapiens
acuuaauacuuaugcaacuuuguaauuagugu

SEQ ID NO: 423771 - RNA, 32 nt, Homo Sapiens
ggcugggauaggacagaagagaguuggcacuu

SEQ ID NO: 423772 - RNA, 31 nt, Homo Sapiens
caguagcugccggucucuggugggucucaca

SEQ ID NO: 423773 - RNA, 32 nt, Homo Sapiens
ggccccucaauccuuacuuucuuccauggaca

SEQ ID NO: 423774 - RNA, 32 nt, Homo Sapiens
auuuuguuagcaacuucuagauguuuaucuuc

SEQ ID NO: 423775 - RNA, 32 nt, Homo Sapiens
auaaaaaaugacuucuuaauuccugccuuuag

SEQ ID NO: 423776 - RNA, 32 nt, Homo Sapiens
guaggggcaaggaaacucgaauaaaggauggg

SEQ ID NO: 423777 - RNA, 32 nt, Homo Sapiens
ucugccaaaaauagagaacuuaugaucuauuc

SEQ ID NO: 423778 - RNA, 32 nt, Homo Sapiens
aacuguuccuucccccuuuccccuccauaaug

SEQ ID NO: 423779 - RNA, 32 nt, Homo Sapiens
ccucuaaauaaaagggaucaucugaaauuaau

SEQ ID NO: 423780 - RNA, 32 nt, Homo Sapiens
cuaugauuuacuaugcagaugaagaggguagg

SEQ ID NO: 423781 - RNA, 32 nt, Homo Sapiens
augagaaccacgugucaagugauuagcuagug

SEQ ID NO: 423782 - RNA, 32 nt, Homo Sapiens
cgcaggaccgggccgcugagccugcagccgcc

SEQ ID NO: 423783 - RNA, 32 nt, Homo Sapiens
uccuuuggaucacuccucucccuaaaccccga

SEQ ID NO: 423784 - RNA, 32 nt, Homo Sapiens
auucuaguuggugugaaauaagaggugcguga

SEQ ID NO: 423785 - RNA, 32 nt, Homo Sapiens
acuacgcgcuggccaacgugcagcaggugcag

SEQ ID NO: 423786 - RNA, 32 nt, Homo Sapiens
agacagcauguacacagccauuccccagagug

SEQ ID NO: 423787 - RNA, 32 nt, Homo Sapiens
ggcacagcccgacugcagggagggaugcaccc

SEQ ID NO: 423788 - RNA, 32 nt, Homo Sapiens
auuucucucauucuuuuuuauuuuggaaaauc

SEQ ID NO: 423789 - RNA, 32 nt, Homo Sapiens
uugagaccagccugaucaacguggugaaaccu

SEQ ID NO: 423790 - RNA, 32 nt, Homo Sapiens
ugaguccgcccauggacggaccgggaccagca

SEQ ID NO: 423791 - RNA, 32 nt, Homo Sapiens
uguaauuuauauuuuacuuaugccaaauuauu

SEQ ID NO: 423792 - RNA, 32 nt, Homo Sapiens
uaggugggagcucacugguaggcggcccugga

SEQ ID NO: 423793 - RNA, 32 nt, Homo Sapiens
uugugggauuuucaguccgcaaaugaagugcu

SEQ ID NO: 423794 - RNA, 28 nt, Homo Sapiens
gagaugcagcggggcgccgcgcugugcc

SEQ ID NO: 423795 - RNA, 32 nt, Homo Sapiens
ugggaccccucuagguguccuccagaccaaac

SEQ ID NO: 423796 - RNA, 32 nt, Homo Sapiens
uugagaccagccugaccaacguggugaaaccc

SEQ ID NO: 423797 - RNA, 32 nt, Homo Sapiens
ucugaccuguccccuggcccagcccuuaggcc

SEQ ID NO: 423798 - RNA, 32 nt, Homo Sapiens
cugggccaugugacccaaggagggauccuuac

SEQ ID NO: 423799 - RNA, 32 nt, Homo Sapiens
ugagucuccagauguuguucugucaguugcca

SEQ ID NO: 423800 - RNA, 32 nt, Homo Sapiens
ucuacuaaaaauacaaaaaauuagcugggcuu

SEQ ID NO: 423801 - RNA, 32 nt, Homo Sapiens
caucaguuguaaaggggaauugguauauucac

SEQ ID NO: 423802 - RNA, 32 nt, Homo Sapiens
gcaaauagcaaggguaggaaguccucaguaag

SEQ ID NO: 423803 - RNA, 32 nt, Homo Sapiens
ucugccagcauccaugaaacuguggcagacuc

SEQ ID NO: 423804 - RNA, 32 nt, Homo Sapiens
acaagccugggaagagaauguugaggugcaga

SEQ ID NO: 423805 - RNA, 32 nt, Homo Sapiens
auguguuuucagucuuucuaucaaauauuauc

SEQ ID NO: 423806 - RNA, 32 nt, Homo Sapiens
cugggacaggugagaagaaacugugaaguaua

SEQ ID NO: 423807 - RNA, 32 nt, Homo Sapiens
cuaguggggccgagacuauucagagccaguag

SEQ ID NO: 423808 - RNA, 32 nt, Homo Sapiens
ggcuggagugcaguggcgugaucugcaaccuc

SEQ ID NO: 423809 - RNA, 32 nt, Homo Sapiens
gaauaaaaaccaaaccaaaacaaaauuaauga

SEQ ID NO: 423810 - RNA, 32 nt, Homo Sapiens
gaagggucucccgcagcccgcaggagacgcag

SEQ ID NO: 423811 - RNA, 32 nt, Homo Sapiens
aaccauugccuuaaauuaauagcagccucuca

SEQ ID NO: 423812 - RNA, 32 nt, Homo Sapiens
aaggggccuguucacgagaagaggaccuccuu

SEQ ID NO: 423813 - RNA, 32 nt, Homo Sapiens
aaugcgggacgcccaggucggugcucggccca

SEQ ID NO: 423814 - RNA, 32 nt, Homo Sapiens
cagcaggucuguaaccacaaaggacaagcagc

SEQ ID NO: 423815 - RNA, 32 nt, Homo Sapiens
uuggcauauuuaugugguuacugcucacuuac

SEQ ID NO: 423816 - RNA, 32 nt, Homo Sapiens
aaauggucauuucuuauucagugagugcuuua

SEQ ID NO: 423817 - RNA, 32 nt, Homo Sapiens
ucgcugcugggggcgcaaccaccccuuccuua

SEQ ID NO: 423818 - RNA, 32 nt, Homo Sapiens
uacaauuccagaugagauuuggguggggacag

SEQ ID NO: 423819 - RNA, 32 nt, Homo Sapiens
gaccuugccaccucccucuccuccuuugaaaa

SEQ ID NO: 423820 - RNA, 32 nt, Homo Sapiens
gaacggacucgcgucuccgcacucgcaguauc

SEQ ID NO: 423821 - RNA, 32 nt, Homo Sapiens
ugagaagguucagaaagccaguacagagggag

SEQ ID NO: 423822 - RNA, 32 nt, Homo Sapiens
ggaagagggauuacaacaggugcaggguugug

SEQ ID NO: 423823 - RNA, 32 nt, Homo Sapiens
ccauacaucauuccuggaagugaggcaagacu

SEQ ID NO: 423824 - RNA, 32 nt, Homo Sapiens
uuauuuaaaaaauuauucuacuggagcuggug

SEQ ID NO: 423825 - RNA, 32 nt, Homo Sapiens
aaauguucauuuuaagugauagauaguggaga

SEQ ID NO: 423826 - RNA, 32 nt, Homo Sapiens
guucauacuuucaaaacauaacagauuaauaa

SEQ ID NO: 423827 - RNA, 32 nt, Homo Sapiens
ccuuuaagauaaaaauguaauguugugauauu

SEQ ID NO: 423828 - RNA, 32 nt, Homo Sapiens
ccucagcgugauguccucucccuccauccugc

SEQ ID NO: 423829 - RNA, 30 nt, Homo Sapiens
guucuaagggucggcggcggcgggguugac

SEQ ID NO: 423830 - RNA, 32 nt, Homo Sapiens
uugcaccucccucuccggcucugcugcccggg

SEQ ID NO: 423831 - RNA, 32 nt, Homo Sapiens
agccaugcaguccacgcgggauugugagcugu

SEQ ID NO: 423832 - RNA, 32 nt, Homo Sapiens
uuacuggcugaguucugcccuguguggcuuuc

SEQ ID NO: 423833 - RNA, 32 nt, Homo Sapiens
cugucauccccaccccaccccuaccucacgcc

SEQ ID NO: 423834 - RNA, 32 nt, Homo Sapiens
cgggcuccaaucgcugcuccucacgcaauccu

SEQ ID NO: 423835 - RNA, 32 nt, Homo Sapiens
ccagcucaugauccuccucccucccccgcccu

SEQ ID NO: 423836 - RNA, 32 nt, Homo Sapiens
cucccagacaaaugcaaucaaaggagacaugu

SEQ ID NO: 423837 - RNA, 29 nt, Homo Sapiens
cacaccucuauccagcauaccaccuauug

SEQ ID NO: 423838 - RNA, 32 nt, Homo Sapiens
cgaggccccuccccggccugcucagacuccuc

SEQ ID NO: 423839 - RNA, 32 nt, Homo Sapiens
cacacagccuccaauccucauccaccagugcc

SEQ ID NO: 423840 - RNA, 32 nt, Homo Sapiens
aaaaagccaguguuaacggagcaagaaacuuc

SEQ ID NO: 423841 - RNA, 32 nt, Homo Sapiens
ugggcauccaacaguuaaucacuuauguuuuu

SEQ ID NO: 423842 - RNA, 32 nt, Homo Sapiens
aauaauaauggaugcauagaaauagaucugga

SEQ ID NO: 423843 - RNA, 32 nt, Homo Sapiens
acgacacauuaucaaaggacuaucuuggaccu

SEQ ID NO: 423844 - RNA, 32 nt, Homo Sapiens
cuggcuuaucuucugcauguccugccuuugcc

SEQ ID NO: 423845 - RNA, 32 nt, Homo Sapiens
cuugccugugcagcugggcgcugaccuuccag

SEQ ID NO: 423846 - RNA, 32 nt, Homo Sapiens
cccaagaagacacccuacacuccuuagcuguc

SEQ ID NO: 423847 - RNA, 32 nt, Homo Sapiens
ggugggaaaguaacauggugcaaccaauguag

SEQ ID NO: 423848 - RNA, 32 nt, Homo Sapiens
cccagaaagcaucuugccgggggcagggcauu

SEQ ID NO: 423849 - RNA, 32 nt, Homo Sapiens
guggagauggcacauccuugcugcuggggacu

SEQ ID NO: 423850 - RNA, 30 nt, Homo Sapiens
augaaagacuucucuacccaucuuaaaaac

SEQ ID NO: 423851 - RNA, 32 nt, Homo Sapiens
agcccuguuagggauccauuggagcauuaagg

SEQ ID NO: 423852 - RNA, 32 nt, Homo Sapiens
uaggaguguuuguauuccuuuagagaucugga

SEQ ID NO: 423853 - RNA, 32 nt, Homo Sapiens
uaaaacgcaccaaucagcucucuguggcuagc

SEQ ID NO: 423854 - RNA, 32 nt, Homo Sapiens
agaggccacauccugcccagcugcugagcaag

SEQ ID NO: 423855 - RNA, 32 nt, Homo Sapiens
caugggaauagucacuuuuuuauuuaguaaau

SEQ ID NO: 423856 - RNA, 32 nt, Homo Sapiens
ggagccaugggcagaagagacugugcagggac

SEQ ID NO: 423857 - RNA, 32 nt, Homo Sapiens
uuugcaugucauuaguuauaucaaauaguuuu

SEQ ID NO: 423858 - RNA, 32 nt, Homo Sapiens
ugugcuguacccacccuuccccggcgagaugg

SEQ ID NO: 423859 - RNA, 32 nt, Homo Sapiens
cucuaggccaggaggagaaggcaugcccugag

SEQ ID NO: 423860 - RNA, 32 nt, Homo Sapiens
uagaagaaaacauauauuuuauuuucauacuu

SEQ ID NO: 423861 - RNA, 32 nt, Homo Sapiens
uauaguaguuuauauuuauugacaugucaauu

SEQ ID NO: 423862 - RNA, 32 nt, Homo Sapiens
agcaaccacaaguuuaaaugaagacaagcuga

SEQ ID NO: 423863 - RNA, 32 nt, Homo Sapiens
gcucgaaacggggcucuugagacgcugagcgc

SEQ ID NO: 423864 - RNA, 32 nt, Homo Sapiens
uucgggaggaggaggcggaggaggcggaggag

SEQ ID NO: 423865 - RNA, 32 nt, Homo Sapiens
uuuuuuacacgccugccuccuguccccuuauc

SEQ ID NO: 423866 - RNA, 32 nt, Homo Sapiens
ugaggcccucuugcgcagcugccucucggccc

SEQ ID NO: 423867 - RNA, 32 nt, Homo Sapiens
cucugaaaugguuuccucccaacccccgcauu

SEQ ID NO: 423868 - RNA, 32 nt, Homo Sapiens
ccauaaaaacuaucucaaaucaccugaacauc

SEQ ID NO: 423869 - RNA, 32 nt, Homo Sapiens
gagcaaaucauauuacauaauuacauuuuaau

SEQ ID NO: 423870 - RNA, 32 nt, Homo Sapiens
uggaaauccgcaacuucagaguguggccuaag

SEQ ID NO: 423871 - RNA, 32 nt, Homo Sapiens
ggacgccaaccagcuccgcgagcugcccgagc

SEQ ID NO: 423872 - RNA, 32 nt, Homo Sapiens
gagccaccacgcccagccuguuuuuauaaacu

SEQ ID NO: 423873 - RNA, 32 nt, Homo Sapiens
auaaucugauacacauaaauagagaaagagca

SEQ ID NO: 423874 - RNA, 32 nt, Homo Sapiens
uuucucaccuuucuuuccuguuucugggacuc

SEQ ID NO: 423875 - RNA, 32 nt, Homo Sapiens
ccagccugacgauguuuuuuacuucuaucacu

SEQ ID NO: 423876 - RNA, 32 nt, Homo Sapiens
cauucccgcuccaugccggccagaguguagaa

SEQ ID NO: 423877 - RNA, 32 nt, Homo Sapiens
uuaccaaggaauaucagaaauaaagagcaccu

SEQ ID NO: 423878 - RNA, 32 nt, Homo Sapiens
agaucugugaaugacaguaagugggugaaggc

SEQ ID NO: 423879 - RNA, 32 nt, Homo Sapiens
caggcaaagggagccgauuuaggggcuggggu

SEQ ID NO: 423880 - RNA, 32 nt, Homo Sapiens
gccggggauggggcuuccugggcccccuagag

SEQ ID NO: 423881 - RNA, 32 nt, Homo Sapiens
ucaguggaggcagaaggaauucauuuugaaaa

SEQ ID NO: 423882 - RNA, 32 nt, Homo Sapiens
cagcucuggauuagacacccccugcuucccac

SEQ ID NO: 423883 - RNA, 32 nt, Homo Sapiens
auguugucauucuuacuaaucuaguccagccg

SEQ ID NO: 423884 - RNA, 32 nt, Homo Sapiens
agcucugccguggcugccucugcacugacacc

SEQ ID NO: 423885 - RNA, 32 nt, Homo Sapiens
aguaaagaggggcuggaaauacgcugguugcu

SEQ ID NO: 423886 - RNA, 32 nt, Homo Sapiens
uggguccaguuuacagaauuuucauguugccu

SEQ ID NO: 423887 - RNA, 32 nt, Homo Sapiens
gguuuugccguguuggccaggcuggucuugaa

SEQ ID NO: 423888 - RNA, 32 nt, Homo Sapiens
gcuauauaacauugcuccauuuugcaaaauuc

SEQ ID NO: 423889 - RNA, 32 nt, Homo Sapiens
uaaauucauaaggaugggaacauuuaaauuaa

SEQ ID NO: 423890 - RNA, 32 nt, Homo Sapiens
acucgguggagaagcgugucagauacggcgug

SEQ ID NO: 423891 - RNA, 32 nt, Homo Sapiens
aguacgccugcgcuugcgugguggauccaaca

SEQ ID NO: 423892 - RNA, 32 nt, Homo Sapiens
ucuacuuaaaagacaaugacuacugaugaagg

SEQ ID NO: 423893 - RNA, 32 nt, Homo Sapiens
aguaccagccccacccuguuuugagcccugag

SEQ ID NO: 423894 - RNA, 32 nt, Homo Sapiens
uaaucuaaaaauuauauaguaaagcugguagc

SEQ ID NO: 423895 - RNA, 32 nt, Homo Sapiens
gccaagcccgcugcagcuuccacaucccugga

SEQ ID NO: 423896 - RNA, 32 nt, Homo Sapiens
gaacaugugaauugucccaaaaaaucuuuaau

SEQ ID NO: 423897 - RNA, 32 nt, Homo Sapiens
uucuacuauugcugaggccaaguacauuuagu

SEQ ID NO: 423898 - RNA, 32 nt, Homo Sapiens
aaacaaauaaaauuauuuaaauaaaaaagaaa

SEQ ID NO: 423899 - RNA, 32 nt, Homo Sapiens
guguguuggaggugggcagucgccgcggaggc

SEQ ID NO: 423900 - RNA, 32 nt, Homo Sapiens
ugccaucccuacagcccucccgcuccaucgac

SEQ ID NO: 423901 - RNA, 32 nt, Homo Sapiens
auucacuaaggccaccaagaaugagccuguga

SEQ ID NO: 423902 - RNA, 32 nt, Homo Sapiens
ucagcccauuucucuccauuuccuccucauua

SEQ ID NO: 423903 - RNA, 32 nt, Homo Sapiens
cgggaggcugccgccucgggacaccccacuca

SEQ ID NO: 423904 - RNA, 32 nt, Homo Sapiens
aucccccacauggacacugaggcgcugaaaaa

SEQ ID NO: 423905 - RNA, 32 nt, Homo Sapiens
cacugcacuccagcccuggcgacagagugaga

SEQ ID NO: 423906 - RNA, 32 nt, Homo Sapiens
ucuuuacuuguugucacccauuugaccacuga

SEQ ID NO: 423907 - RNA, 32 nt, Homo Sapiens
ccaauugcagauuuuugcuaaaacagacaaaa

SEQ ID NO: 423908 - RNA, 32 nt, Homo Sapiens
ccucgugguccucaauuauccuugcuucucug

SEQ ID NO: 423909 - RNA, 32 nt, Homo Sapiens
aggugcugagaggggagggagaguuugcggcc

SEQ ID NO: 423910 - RNA, 32 nt, Homo Sapiens
acaagcugcccccaggguaccauuuggggagg

SEQ ID NO: 423911 - RNA, 32 nt, Homo Sapiens
ucuucuaccuccgucucgcuuuucuucagugc

SEQ ID NO: 423912 - RNA, 32 nt, Homo Sapiens
uaucauuuaauuuguaauuuucguuucagaag

SEQ ID NO: 423913 - RNA, 32 nt, Homo Sapiens
ccccaggcuuuagugcagcugccaacccuguu

SEQ ID NO: 423914 - RNA, 31 nt, Homo Sapiens
gaauuuguguucauaaguucagauggguagc

SEQ ID NO: 423915 - RNA, 32 nt, Homo Sapiens
aauggugauugaagcaaaauauguaaacuugu

SEQ ID NO: 423916 - RNA, 32 nt, Homo Sapiens
ucccaaugugugccuguaccauaauguauuca

SEQ ID NO: 423917 - RNA, 32 nt, Homo Sapiens
acugacaaaaauuauuuucuguuaguuugaga

SEQ ID NO: 423918 - RNA, 32 nt, Homo Sapiens
gaaacuuuugaaaaaguguacaugaagaaugu

SEQ ID NO: 423919 - RNA, 32 nt, Homo Sapiens
auacaguaaaacuccacacaaucuuguuagca

SEQ ID NO: 423920 - RNA, 32 nt, Homo Sapiens
gccuccaucccaugggcugcugucuggguucu

SEQ ID NO: 423921 - RNA, 32 nt, Homo Sapiens
aauccaauauuuugccuuuuuucuauaucaaa

SEQ ID NO: 423922 - RNA, 32 nt, Homo Sapiens
uggcuuuugugcuuuggguuucuuuguugacu

SEQ ID NO: 423923 - RNA, 32 nt, Homo Sapiens
uggugcaggaggcgcgggcgcugcgggcgggg

SEQ ID NO: 423924 - RNA, 32 nt, Homo Sapiens
agcagccuuuugggguaaaauauguuacaaua

SEQ ID NO: 423925 - RNA, 32 nt, Homo Sapiens
uguccucugccguguuugcgcggccucagugc

SEQ ID NO: 423926 - RNA, 32 nt, Homo Sapiens
ccugccugcccccacacccacuccacaccagu

SEQ ID NO: 423927 - RNA, 30 nt, Homo Sapiens
caccuggagaagcugguaggguaagggaga

SEQ ID NO: 423928 - RNA, 32 nt, Homo Sapiens
cggcgggcgcgcucagucuggcggcggcugcc

SEQ ID NO: 423929 - RNA, 32 nt, Homo Sapiens
cuggcaugucugggucgucuuuugaaaagcuc

SEQ ID NO: 423930 - RNA, 32 nt, Homo Sapiens
gcccaccugcugucccggcugcggccagccag

SEQ ID NO: 423931 - RNA, 32 nt, Homo Sapiens
acugggcugggucuuccaaaccuaccaugaaa

SEQ ID NO: 423932 - RNA, 32 nt, Homo Sapiens
acuaugcuaugcacuguucugcucuuuuuuga

SEQ ID NO: 423933 - RNA, 32 nt, Homo Sapiens
gcaguuuauuuuguuauguuggauaaauacug

SEQ ID NO: 423934 - RNA, 32 nt, Homo Sapiens
cuccugggucucuggaggagcccaggaaggag

SEQ ID NO: 423935 - RNA, 32 nt, Homo Sapiens
aaauccugcagggccacagucggcacuguuau

SEQ ID NO: 423936 - RNA, 32 nt, Homo Sapiens
aacagcuuuaaaacgugcucuucguaggcccg

SEQ ID NO: 423937 - RNA, 31 nt, Homo Sapiens
accaucccagccugccugccucggggcgcag

SEQ ID NO: 423938 - RNA, 32 nt, Homo Sapiens
cagccccgacugcuccuccucuuccuccuccu

SEQ ID NO: 423939 - RNA, 32 nt, Homo Sapiens
aacacuucaaggagacuucuacauccaaagca

SEQ ID NO: 423940 - RNA, 32 nt, Homo Sapiens
gguguuucaugggaaaaucuacacaaacuauu

SEQ ID NO: 423941 - RNA, 32 nt, Homo Sapiens
ugaauuuuucuuuuccucuuugggaauccaaa

SEQ ID NO: 423942 - RNA, 32 nt, Homo Sapiens
aguagcaacagauaaugaccaauaacugguuc

SEQ ID NO: 423943 - RNA, 32 nt, Homo Sapiens
cauagagggccuugcagccugauaccacuggg

SEQ ID NO: 423944 - RNA, 32 nt, Homo Sapiens
gcgggacgugacgcagcgcccggggcgcgggu

SEQ ID NO: 423945 - RNA, 32 nt, Homo Sapiens
ugcuccugcccucuccuugcccugccucagcu

SEQ ID NO: 423946 - RNA, 32 nt, Homo Sapiens
uuucccuucgcggugcccacuccacuccuugu

SEQ ID NO: 423947 - RNA, 32 nt, Homo Sapiens
uccuccucuguuucauagaaaagucauagaau

SEQ ID NO: 423948 - RNA, 31 nt, Homo Sapiens
cuggguccagccaccaccaggcugagcagug

SEQ ID NO: 423949 - RNA, 32 nt, Homo Sapiens
cuucugaccucccagggugucugaggccucua

SEQ ID NO: 423950 - RNA, 32 nt, Homo Sapiens
auagucuguguacaggaguaaauauguuaagu

SEQ ID NO: 423951 - RNA, 32 nt, Homo Sapiens
aaaaagcgaaggccgagggaugugcuaagggu

SEQ ID NO: 423952 - RNA, 32 nt, Homo Sapiens
aggacuagacauuuucauaaugguggcuccau

SEQ ID NO: 423953 - RNA, 32 nt, Homo Sapiens
ggagcugcccuuucuccuuccuggcccugugu

SEQ ID NO: 423954 - RNA, 32 nt, Homo Sapiens
cagugggcucuccaggcccaccucuuccucac

SEQ ID NO: 423955 - RNA, 32 nt, Homo Sapiens
ucuugagccaucaugcacaucugacugcagcc

SEQ ID NO: 423956 - RNA, 32 nt, Homo Sapiens
ggucugcuccccaccccugccucggaagaaua

SEQ ID NO: 423957 - RNA, 32 nt, Homo Sapiens
acacccacagacgucagcugguggauucccgc

SEQ ID NO: 423958 - RNA, 32 nt, Homo Sapiens
auguuaauaugguuuuuaaauugguaacuuuu

SEQ ID NO: 423959 - RNA, 32 nt, Homo Sapiens
gccuccgccucccggauggacgcucugccccg

SEQ ID NO: 423960 - RNA, 32 nt, Homo Sapiens
uauguaaacaaaucaacaugacuguguuucaa

SEQ ID NO: 423961 - RNA, 32 nt, Homo Sapiens
cagugagaaaucaaccaccuucuacacuagcc

SEQ ID NO: 423962 - RNA, 32 nt, Homo Sapiens
auuguuaaauagucccugcuuuaagggacuac

SEQ ID NO: 423963 - RNA, 29 nt, Homo Sapiens
guggagaugaagauccuggcucugugcug

SEQ ID NO: 423964 - RNA, 32 nt, Homo Sapiens
gagagguuacaugaaaauguguagccagacac

SEQ ID NO: 423965 - RNA, 32 nt, Homo Sapiens
auuguggaucaugguauaugcaggcuaucagc

SEQ ID NO: 423966 - RNA, 32 nt, Homo Sapiens
cgaguaccugacgcucaacuucgggcccuucg

SEQ ID NO: 423967 - RNA, 32 nt, Homo Sapiens
gcgccucugaaguggagggcgggccgccuggg

SEQ ID NO: 423968 - RNA, 32 nt, Homo Sapiens
gcuuggggccccugucugcugcuggacgcaga

SEQ ID NO: 423969 - RNA, 32 nt, Homo Sapiens
ugcaaggcugucacaaggaaaagcagccggcu

SEQ ID NO: 423970 - RNA, 32 nt, Homo Sapiens
acagguaaagucuuugaaaauauguguaauau

SEQ ID NO: 423971 - RNA, 32 nt, Homo Sapiens
cauagaugaugauguuuauuuaaaaaaaaaac

SEQ ID NO: 423972 - RNA, 32 nt, Homo Sapiens
auguacuguauauguguauguuauacagacau

SEQ ID NO: 423973 - RNA, 32 nt, Homo Sapiens
ucuacccggcccggucccugcgcgggcacagc

SEQ ID NO: 423974 - RNA, 32 nt, Homo Sapiens
ugcagcuuuccaccgugccuggagccgauccg

SEQ ID NO: 423975 - RNA, 32 nt, Homo Sapiens
gcccucaucacagccacccccaccacgagugu

SEQ ID NO: 423976 - RNA, 32 nt, Homo Sapiens
ugauaucauuggcuuauuggaugaaacagugu

SEQ ID NO: 423977 - RNA, 32 nt, Homo Sapiens
ggacagggccuaggccucuccucagcuccuua

SEQ ID NO: 423978 - RNA, 32 nt, Homo Sapiens
aaaauguguauauaugauuucuauauccuugu

SEQ ID NO: 423979 - RNA, 32 nt, Homo Sapiens
cugcagacaauuuuaggaugugguuuacagua

SEQ ID NO: 423980 - RNA, 32 nt, Homo Sapiens
guucccacacaggaggcagcucuccuccagug

SEQ ID NO: 423981 - RNA, 32 nt, Homo Sapiens
cgucagcgcccggcacugccacccggguccgg

SEQ ID NO: 423982 - RNA, 32 nt, Homo Sapiens
gccugcgaguccccggcagcccccgaccccuc

SEQ ID NO: 423983 - RNA, 29 nt, Homo Sapiens
uuugugguggugauguccauuaaggaaac

SEQ ID NO: 423984 - RNA, 32 nt, Homo Sapiens
gauuuaucaaggaauuugaucacuagccuuaa

SEQ ID NO: 423985 - RNA, 32 nt, Homo Sapiens
cucuggagaauuucucccacuccccaccucug

SEQ ID NO: 423986 - RNA, 32 nt, Homo Sapiens
gcgcaccugggagggagcugccauccgggcuc

SEQ ID NO: 423987 - RNA, 32 nt, Homo Sapiens
ugucaaaguggucgccaaaugguuuuucuauc

SEQ ID NO: 423988 - RNA, 32 nt, Homo Sapiens
uggacggaggaacgcgggcgucuggagggggg

SEQ ID NO: 423989 - RNA, 32 nt, Homo Sapiens
ccugcguggaccgggucuggauugagucucau

SEQ ID NO: 423990 - RNA, 32 nt, Homo Sapiens
guguccagaaaagaguagcagcagugaggaag

SEQ ID NO: 423991 - RNA, 32 nt, Homo Sapiens
ugagguuauauaugcacaaacacacacagaaa

SEQ ID NO: 423992 - RNA, 32 nt, Homo Sapiens
ccuuucauaaagcaccagcaguguuuaaaaaa

SEQ ID NO: 423993 - RNA, 32 nt, Homo Sapiens
gugccagcucuuuuuaggguuuuggaucacau

SEQ ID NO: 423994 - RNA, 32 nt, Homo Sapiens
caaguuuacaguuguaagugcaaugacccgag

SEQ ID NO: 423995 - RNA, 32 nt, Homo Sapiens
uagaucuuucuuccguacuggaugcuuccugc

SEQ ID NO: 423996 - RNA, 32 nt, Homo Sapiens
uacccucccuccccacccccagcgucaucucg

SEQ ID NO: 423997 - RNA, 32 nt, Homo Sapiens
aauuuguuuuuaaagguugaauaaucuuuugu

SEQ ID NO: 423998 - RNA, 32 nt, Homo Sapiens
ugugcagagagaaguagaagcuagaaagcaca

SEQ ID NO: 423999 - RNA, 32 nt, Homo Sapiens
cauucauccaacaaacauuuacugcacgagga

SEQ ID NO: 424000 - RNA, 32 nt, Homo Sapiens
cgccuccgccgccgcucgcguccucgccgcca

SEQ ID NO: 424001 - RNA, 32 nt, Homo Sapiens
uagaucuguaucagcaucauuuuaauggcuau

SEQ ID NO: 424002 - RNA, 32 nt, Homo Sapiens
ucucuuucuaguuugguaggaaucacccugaa

SEQ ID NO: 424003 - RNA, 32 nt, Homo Sapiens
ccucagcgaguacgcccggccgggcgggcugg

SEQ ID NO: 424004 - RNA, 32 nt, Homo Sapiens
aaccucccgcugcugcugcugcugcugggggc

SEQ ID NO: 424005 - RNA, 32 nt, Homo Sapiens
gaggggugccagcaggugcccccacgaguggg

SEQ ID NO: 424006 - RNA, 32 nt, Homo Sapiens
acuguccuaugggcuucuccaguguccacagg

SEQ ID NO: 424007 - RNA, 32 nt, Homo Sapiens
ugaccuuauuuuuucccguuaagaaacaagcg

SEQ ID NO: 424008 - RNA, 32 nt, Homo Sapiens
uuauucauccucagccggcaacucaucucaag

SEQ ID NO: 424009 - RNA, 32 nt, Homo Sapiens
gccauuacuacuguacacggaccaucgccucu

SEQ ID NO: 424010 - RNA, 32 nt, Homo Sapiens
cacccuguucccuccugauacucugcuuuccc

SEQ ID NO: 424011 - RNA, 32 nt, Homo Sapiens
augucacuguuuuuauuccuuccaucuagcag

SEQ ID NO: 424012 - RNA, 32 nt, Homo Sapiens
agccgggcgagggcugggagcugggccggguc

SEQ ID NO: 424013 - RNA, 32 nt, Homo Sapiens
aaucaggucucuugaggccugccaaaugacua

SEQ ID NO: 424014 - RNA, 32 nt, Homo Sapiens
acuaugauauucuggacauuuuaggaaauggu

SEQ ID NO: 424015 - RNA, 32 nt, Homo Sapiens
uccauuaugauuauuucuauuaguuccaguuu

SEQ ID NO: 424016 - RNA, 32 nt, Homo Sapiens
cagauuugaaaauaaugcacauaugguguuca

SEQ ID NO: 424017 - RNA, 32 nt, Homo Sapiens
cuaucauguaaaauaucaaaguuaaaauacua

SEQ ID NO: 424018 - RNA, 32 nt, Homo Sapiens
gcaccgggcaggcgccucacagagcacagacg

SEQ ID NO: 424019 - RNA, 32 nt, Homo Sapiens
gaucacaaagcacaacgaugaugaacaguaug

SEQ ID NO: 424020 - RNA, 32 nt, Homo Sapiens
caguggcaggcagcuggaguagagcgagccca

SEQ ID NO: 424021 - RNA, 32 nt, Homo Sapiens
cacggcccuggccuuaacucauaucuuaggca

SEQ ID NO: 424022 - RNA, 32 nt, Homo Sapiens
gugcacggccagcugcaucuacucaggcccca

SEQ ID NO: 424023 - RNA, 32 nt, Homo Sapiens
aucugaagugggagaagaagcagguagaccac

SEQ ID NO: 424024 - RNA, 32 nt, Homo Sapiens
ccaagguagaccccuaggaaaagcagaggguc

SEQ ID NO: 424025 - RNA, 32 nt, Homo Sapiens
ucugaauuuuuuucucauucgucagcucugua

SEQ ID NO: 424026 - RNA, 32 nt, Homo Sapiens
agggcgccucacagcagccgcggcacaggggc

SEQ ID NO: 424027 - RNA, 32 nt, Homo Sapiens
aagguuuuaagugguuugaucauuucuuguga

SEQ ID NO: 424028 - RNA, 32 nt, Homo Sapiens
caguaaguaauauauauaacugaccacgcuca

SEQ ID NO: 424029 - RNA, 32 nt, Homo Sapiens
cuggaugugggaaaauuaaugagaaauuggga

SEQ ID NO: 424030 - RNA, 32 nt, Homo Sapiens
cugaggagccgcuacgaggccuuccugagucc

SEQ ID NO: 424031 - RNA, 32 nt, Homo Sapiens
uuaaaaaauaaaauaaaauaaaaauuggccuc

SEQ ID NO: 424032 - RNA, 32 nt, Homo Sapiens
uuagcgaauguggcgucuucugcaaacaauag

SEQ ID NO: 424033 - RNA, 32 nt, Homo Sapiens
caagccgcaccggagcagcggcuggauugaac

SEQ ID NO: 424034 - RNA, 32 nt, Homo Sapiens
gaaugugcagggcugauguggcacugaggagc

SEQ ID NO: 424035 - RNA, 32 nt, Homo Sapiens
cagccucccacaugagccccagcucccagccc

SEQ ID NO: 424036 - RNA, 32 nt, Homo Sapiens
cuuauauguaggcauuuguuaguuccaaugau

SEQ ID NO: 424037 - RNA, 29 nt, Homo Sapiens
gaauugaagucguuuuguuuaacgcugug

SEQ ID NO: 424038 - RNA, 32 nt, Homo Sapiens
auuggaaaagcacuuguucucucuggcucagu

SEQ ID NO: 424039 - RNA, 32 nt, Homo Sapiens
uggacacagagcaugagcguguugacaucugg

SEQ ID NO: 424040 - RNA, 32 nt, Homo Sapiens
aacaaaaguauguuuuaaaugcuuugaagacu

SEQ ID NO: 424041 - RNA, 32 nt, Homo Sapiens
ucucggggcggacucccggcccuccgcgcccu

SEQ ID NO: 424042 - RNA, 32 nt, Homo Sapiens
gggguauuagcaccucuuuuugaacagagaau

SEQ ID NO: 424043 - RNA, 32 nt, Homo Sapiens
uccuucuuauacauuaaaaauagugugaaaca

SEQ ID NO: 424044 - RNA, 32 nt, Homo Sapiens
caaaaccaacuaaaaagugauucuugcacaug

SEQ ID NO: 424045 - RNA, 32 nt, Homo Sapiens
uucggaagccccuggucuaacuugggaucugg

SEQ ID NO: 424046 - RNA, 32 nt, Homo Sapiens
agucaggaaagggggcuuggggcuugccacau

SEQ ID NO: 424047 - RNA, 32 nt, Homo Sapiens
augugauuugaaagaguagggaugacauggag

SEQ ID NO: 424048 - RNA, 32 nt, Homo Sapiens
uuggaggauuuauagaaccugauuccaaaacu

SEQ ID NO: 424049 - RNA, 32 nt, Homo Sapiens
agaaaaucaaguggucccacuagagaauccau

SEQ ID NO: 424050 - RNA, 28 nt, Homo Sapiens
cccauggcagucuuauuccuccuccugu

SEQ ID NO: 424051 - RNA, 32 nt, Homo Sapiens
cggccccggcuggcugcccacugugcccgcug

SEQ ID NO: 424052 - RNA, 32 nt, Homo Sapiens
gaagcccugccagcagagcaggcuggcguuug

SEQ ID NO: 424053 - RNA, 32 nt, Homo Sapiens
acccugcucuccuaguauauuccuuuuugcug

SEQ ID NO: 424054 - RNA, 32 nt, Homo Sapiens
aaaccaaaucaucaguuaucaaugucuguuua

SEQ ID NO: 424055 - RNA, 32 nt, Homo Sapiens
gaauaauccaacauaaauugccauagauagaa

SEQ ID NO: 424056 - RNA, 32 nt, Homo Sapiens
aguacugacacaugcugugacaucagugaacc

SEQ ID NO: 424057 - RNA, 32 nt, Homo Sapiens
gaaauugaaaggaaacccacagaauaggauaa

SEQ ID NO: 424058 - RNA, 32 nt, Homo Sapiens
cgcagacgcagugcugagcacacagcuaccgg

SEQ ID NO: 424059 - RNA, 32 nt, Homo Sapiens
gucuucugccagcccauuuugaggccagaggu

SEQ ID NO: 424060 - RNA, 29 nt, Homo Sapiens
gaagcaugguguuucagaacugagaccuc

SEQ ID NO: 424061 - RNA, 32 nt, Homo Sapiens
ccaaggcggugggaaacgguggggcuuucuga

SEQ ID NO: 424062 - RNA, 32 nt, Homo Sapiens
auuuuaaccuuuuacauuauuguuauuaaugu

SEQ ID NO: 424063 - RNA, 32 nt, Homo Sapiens
gugcugggggguucgggugcugcagaccugga

SEQ ID NO: 424064 - RNA, 32 nt, Homo Sapiens
uggcuaccacacgcggcaucgcuccuuggggu

SEQ ID NO: 424065 - RNA, 32 nt, Homo Sapiens
cuagauauuauuaauaguuuauaauucaguaa

SEQ ID NO: 424066 - RNA, 32 nt, Homo Sapiens
aguccucuuuugcagauaccuacaaagggccu

SEQ ID NO: 424067 - RNA, 31 nt, Homo Sapiens
cucgcggccauugggcugccccgcggcgcgc

SEQ ID NO: 424068 - RNA, 32 nt, Homo Sapiens
gaauuucacucuuguugccuagcuggagugca

SEQ ID NO: 424069 - RNA, 32 nt, Homo Sapiens
ccuguuuuacuuuaccuucacuaacaaugggg

SEQ ID NO: 424070 - RNA, 32 nt, Homo Sapiens
uuucaauggaaauucacguugcuuugcauuuc

SEQ ID NO: 424071 - RNA, 32 nt, Homo Sapiens
acucauacuggagaaaaaucuuacaaauguga

SEQ ID NO: 424072 - RNA, 32 nt, Homo Sapiens
auauuugccuucauuaggacugcguuucccaa

SEQ ID NO: 424073 - RNA, 32 nt, Homo Sapiens
ccugcagcucucuuguggaccccugcccgccc

SEQ ID NO: 424074 - RNA, 32 nt, Homo Sapiens
uccuuuccaggccaugcuucuuaccccagugg

SEQ ID NO: 424075 - RNA, 32 nt, Homo Sapiens
ggcacgagggcagggcuggcucucccaaugcc

SEQ ID NO: 424076 - RNA, 32 nt, Homo Sapiens
uuggccuaaaauuggcgcuggaauuugggcug

SEQ ID NO: 424077 - RNA, 32 nt, Homo Sapiens
aauaguagcauuaugagaaugacgcagacaau

SEQ ID NO: 424078 - RNA, 32 nt, Homo Sapiens
accaagacuuugcuugaauguuuacauuuucu

SEQ ID NO: 424079 - RNA, 32 nt, Homo Sapiens
cccuauagcauuacagugcugaaugagaaaga

SEQ ID NO: 424080 - RNA, 32 nt, Homo Sapiens
gggcuacgaccuggucuacagcccccagagcg

SEQ ID NO: 424081 - RNA, 32 nt, Homo Sapiens
uaaagucauugcugucuuuuuauuuuugaaau

SEQ ID NO: 424082 - RNA, 32 nt, Homo Sapiens
acgugacccucaagauuggggaccacaaauuc

SEQ ID NO: 424083 - RNA, 32 nt, Homo Sapiens
ccggccccagcuccagccccagcccagguggg

SEQ ID NO: 424084 - RNA, 32 nt, Homo Sapiens
cagaagcgaugggguaccguguaggggagcca

SEQ ID NO: 424085 - RNA, 32 nt, Homo Sapiens
cuccgagccggggcuauuucuggcgcuggcgc

SEQ ID NO: 424086 - RNA, 32 nt, Homo Sapiens
gagcuaauucccacaaggaauguagacugaau

SEQ ID NO: 424087 - RNA, 32 nt, Homo Sapiens
gagugagcgggucugggcggcugcuggcagcg

SEQ ID NO: 424088 - RNA, 32 nt, Homo Sapiens
ggccgccuucugcuccagcugcaucacaguga

SEQ ID NO: 424089 - RNA, 32 nt, Homo Sapiens
cgggucgcgggaucggccgccaucgccgccgc

SEQ ID NO: 424090 - RNA, 32 nt, Homo Sapiens
uucaaaagcaauuuaagauauucauaguguua

SEQ ID NO: 424091 - RNA, 32 nt, Homo Sapiens
agaacagacauuagcuuaaguuuucccaucag

SEQ ID NO: 424092 - RNA, 32 nt, Homo Sapiens
cugggagaccgugaagugcaaagcagauggag

SEQ ID NO: 424093 - RNA, 32 nt, Homo Sapiens
gacccuggugccuccauguggaugcugccuca

SEQ ID NO: 424094 - RNA, 32 nt, Homo Sapiens
aggaaaugaagaacaccagaaauggaucggcc

SEQ ID NO: 424095 - RNA, 32 nt, Homo Sapiens
agagauagaugccugcauggguccuggcgauu

SEQ ID NO: 424096 - RNA, 32 nt, Homo Sapiens
uugcccaccgguuuccugcaagaucccuuggc

SEQ ID NO: 424097 - RNA, 32 nt, Homo Sapiens
aggcuuccuuggcaucacagggcagagccggg

SEQ ID NO: 424098 - RNA, 32 nt, Homo Sapiens
auaauaaguauuuuacauuauuaucuggcaua

SEQ ID NO: 424099 - RNA, 32 nt, Homo Sapiens
ccucggguccauccggccccgccgcccgacuu

SEQ ID NO: 424100 - RNA, 32 nt, Homo Sapiens
auuauuuaucugcuuuuauuuuagucacuaaa

SEQ ID NO: 424101 - RNA, 32 nt, Homo Sapiens
auggggacccguccacgucuccaggacaucag

SEQ ID NO: 424102 - RNA, 32 nt, Homo Sapiens
acaguccucccuccccaggggacauuuggcaa

SEQ ID NO: 424103 - RNA, 32 nt, Homo Sapiens
cugcgcucuuguccccgcaggucgcagccagg

SEQ ID NO: 424104 - RNA, 31 nt, Homo Sapiens
acuggaacaaauuauuuuuggugugugugac

SEQ ID NO: 424105 - RNA, 32 nt, Homo Sapiens
gacucuucaagcuguuggugaggugggacgaa

SEQ ID NO: 424106 - RNA, 32 nt, Homo Sapiens
aggugucuuuaacuggggaaguaccacaaaca

SEQ ID NO: 424107 - RNA, 32 nt, Homo Sapiens
acgacuggcggacggucgcgggccuggagacc

SEQ ID NO: 424108 - RNA, 32 nt, Homo Sapiens
cuguaucuuauguugcuuuugguguuuugugu

SEQ ID NO: 424109 - RNA, 32 nt, Homo Sapiens
cucccuuuuaggugaagccccuuuuucuugcu

SEQ ID NO: 424110 - RNA, 30 nt, Homo Sapiens
ucuuuuccuccgccuccgccggcgcgaugg

SEQ ID NO: 424111 - RNA, 32 nt, Homo Sapiens
ugcacuguaaaaaauguucaucauuuaauaaa

SEQ ID NO: 424112 - RNA, 32 nt, Homo Sapiens
aguacugcggggcucucagggcugggaggacc

SEQ ID NO: 424113 - RNA, 32 nt, Homo Sapiens
aagcuugguggcaccagggcccgggguucggg

SEQ ID NO: 424114 - RNA, 32 nt, Homo Sapiens
ugggguguggggauuggugggucuauguuccc

SEQ ID NO: 424115 - RNA, 32 nt, Homo Sapiens
augguuagaucuuuaauguaucuggaauggau

SEQ ID NO: 424116 - RNA, 32 nt, Homo Sapiens
ccccgugguagaaugagcuggagcacgcucua

SEQ ID NO: 424117 - RNA, 30 nt, Homo Sapiens
ccaggucuggggaugggggacaccuugggc

SEQ ID NO: 424118 - RNA, 32 nt, Homo Sapiens
ccaggccugguccaugagacacuccagguauu

SEQ ID NO: 424119 - RNA, 32 nt, Homo Sapiens
caacaaaggucuuugagcaagccagcagcuug

SEQ ID NO: 424120 - RNA, 32 nt, Homo Sapiens
agccacagcuggaagcccaggccugcagcugu

SEQ ID NO: 424121 - RNA, 32 nt, Homo Sapiens
ucucuggcuuugcggugggcuguggaggcugg

SEQ ID NO: 424122 - RNA, 32 nt, Homo Sapiens
gagcucccacccaggauugucagcugaggccc

SEQ ID NO: 424123 - RNA, 32 nt, Homo Sapiens
agcacccugggaacugggucuuggguagcaaa

SEQ ID NO: 424124 - RNA, 32 nt, Homo Sapiens
gccugcugcugucucuuccagcauuggugugu

SEQ ID NO: 424125 - RNA, 32 nt, Homo Sapiens
gggacuaggaccugagccugguccuggccguc

SEQ ID NO: 424126 - RNA, 32 nt, Homo Sapiens
ggugggccaggccccaggacagccggagcucg

SEQ ID NO: 424127 - RNA, 32 nt, Homo Sapiens
uuuugugcuaaaaauauaccauauaaaaaagu

SEQ ID NO: 424128 - RNA, 32 nt, Homo Sapiens
uaguacuuguaauuucuuucugcuuagaaucu

SEQ ID NO: 424129 - RNA, 32 nt, Homo Sapiens
aagugcgcaaaacacauccuuauuguuccuga

SEQ ID NO: 424130 - RNA, 32 nt, Homo Sapiens
uuaaugucacuacauguuauguuuccugaauu

SEQ ID NO: 424131 - RNA, 32 nt, Homo Sapiens
cucacagcccuuggcuggggcuccuccagcuc

SEQ ID NO: 424132 - RNA, 32 nt, Homo Sapiens
caugccuccuccugcccuccgccccguccccc

SEQ ID NO: 424133 - RNA, 32 nt, Homo Sapiens
ugacagggucugcggcaccgcgccuggccagg

SEQ ID NO: 424134 - RNA, 32 nt, Homo Sapiens
cccgccaggcgcgccggcgccgggccauguac

SEQ ID NO: 424135 - RNA, 32 nt, Homo Sapiens
aagaguauguuaucaccuccauguguuuaagu

SEQ ID NO: 424136 - RNA, 32 nt, Homo Sapiens
uguuuugauuuuuggauuuucuuaauucaaca

SEQ ID NO: 424137 - RNA, 32 nt, Homo Sapiens
ugaggggcucugcauuggcccccaccgaggca

SEQ ID NO: 424138 - RNA, 32 nt, Homo Sapiens
ccgcuuuugugccucucacaggcgccuaaagu

SEQ ID NO: 424139 - RNA, 32 nt, Homo Sapiens
auaucacagugggccucuccaacaauuuaaac

SEQ ID NO: 424140 - RNA, 32 nt, Homo Sapiens
gcucucaucuuuaauuuuuagagauugucuga

SEQ ID NO: 424141 - RNA, 32 nt, Homo Sapiens
cagaggacggcagugcuguguccgccaccagc

SEQ ID NO: 424142 - RNA, 32 nt, Homo Sapiens
augaucguugaccuuuuauaaucuucuguagg

SEQ ID NO: 424143 - RNA, 32 nt, Homo Sapiens
ggagacacgaggagggccugcccggaagucac

SEQ ID NO: 424144 - RNA, 32 nt, Homo Sapiens
uuuugaccaaaauaaauaugaaaucuuauauu

SEQ ID NO: 424145 - RNA, 32 nt, Homo Sapiens
gaacucuguacauuuuaacauaaaaaauaaau

SEQ ID NO: 424146 - RNA, 32 nt, Homo Sapiens
aaagacugacuucuuaacaauccaaaaaagaa

SEQ ID NO: 424147 - RNA, 32 nt, Homo Sapiens
gcggugggcaagggcuggccgcagcuccugug

SEQ ID NO: 424148 - RNA, 32 nt, Homo Sapiens
ugaagcccacccagaaaaaacuugcugguccu

SEQ ID NO: 424149 - RNA, 32 nt, Homo Sapiens
uuguuuucaaaauaaaguuuuauuauuucaaa

SEQ ID NO: 424150 - RNA, 32 nt, Homo Sapiens
uaagcaguuuauucugagccccggggguagac

SEQ ID NO: 424151 - RNA, 32 nt, Homo Sapiens
cuugcuggggguggagggugggacacaugagg

SEQ ID NO: 424152 - RNA, 32 nt, Homo Sapiens
ugggcgcccgacggaccauccccgggacccgc

SEQ ID NO: 424153 - RNA, 32 nt, Homo Sapiens
gaggagggaaagggguggcucuggcaggaaaa

SEQ ID NO: 424154 - RNA, 32 nt, Homo Sapiens
auagaaguccgcauagucaucauaaucccguu

SEQ ID NO: 424155 - RNA, 32 nt, Homo Sapiens
cagagaacagagcuacgcagagcauccucauc

SEQ ID NO: 424156 - RNA, 32 nt, Homo Sapiens
agcaacaucacguggaaaaugucugcccuagg

SEQ ID NO: 424157 - RNA, 32 nt, Homo Sapiens
cugcccugaauucuauccuacuccaccuucag

SEQ ID NO: 424158 - RNA, 32 nt, Homo Sapiens
augcucuccccucccuuuuuaaacaaauggcu

SEQ ID NO: 424159 - RNA, 32 nt, Homo Sapiens
uggccgccgugagguuuuacuccagcguuccc

SEQ ID NO: 424160 - RNA, 32 nt, Homo Sapiens
agggaacgugguacucacuggaugcacccagg

SEQ ID NO: 424161 - RNA, 32 nt, Homo Sapiens
cuugccuauuuuuuaauucaguuuuuauuuuc

SEQ ID NO: 424162 - RNA, 32 nt, Homo Sapiens
agccucaugagcauaggccuuccuaugaagua

SEQ ID NO: 424163 - RNA, 32 nt, Homo Sapiens
aaacauuuaaacaaaaaugggauaagaauagu

SEQ ID NO: 424164 - RNA, 32 nt, Homo Sapiens
agccuguacccaccccagcacagccaccugcc

SEQ ID NO: 424165 - RNA, 32 nt, Homo Sapiens
cugucucagggaauugccugcuggggugaugc

SEQ ID NO: 424166 - RNA, 32 nt, Homo Sapiens
uugguuuccuggaugcugacugugaagauucu

SEQ ID NO: 424167 - RNA, 32 nt, Homo Sapiens
gcucguuugcaaacagggggauuaaagcauca

SEQ ID NO: 424168 - RNA, 30 nt, Homo Sapiens
ucucagggagguggugggcggggcccuugc

SEQ ID NO: 424169 - RNA, 32 nt, Homo Sapiens
guaaccuguuuuuugauuaccguaagacauca

SEQ ID NO: 424170 - RNA, 32 nt, Homo Sapiens
uccuggccaagagaagccuguccccaagaaca

SEQ ID NO: 424171 - RNA, 32 nt, Homo Sapiens
auucaaaugucagccguuuguaaaaugcugua

SEQ ID NO: 424172 - RNA, 32 nt, Homo Sapiens
gucgccuugccgccgcccggccccacaguugu

SEQ ID NO: 424173 - RNA, 32 nt, Homo Sapiens
gccuucuugcacacccaccucucccugcaccu

SEQ ID NO: 424174 - RNA, 32 nt, Homo Sapiens
ggccuuugcccccacagccccuccacgccugc

SEQ ID NO: 424175 - RNA, 32 nt, Homo Sapiens
gggcugucuguacagcuccguacugccuaugu

SEQ ID NO: 424176 - RNA, 32 nt, Homo Sapiens
cugggccggaucugguuuggagacaaagggga

SEQ ID NO: 424177 - RNA, 32 nt, Homo Sapiens
ugaugcuguccuuccuggaccccauucugucc

SEQ ID NO: 424178 - RNA, 32 nt, Homo Sapiens
uccucuacccccagguucuccuccccacagcc

SEQ ID NO: 424179 - RNA, 32 nt, Homo Sapiens
caauccccaaacuccuucuccuaccaugccuu

SEQ ID NO: 424180 - RNA, 32 nt, Homo Sapiens
uuacaauuuucugcaucuugaggaaggggcgu

SEQ ID NO: 424181 - RNA, 32 nt, Homo Sapiens
gggcaggcgggcgggcuggcuggcaggcagga

SEQ ID NO: 424182 - RNA, 32 nt, Homo Sapiens
guugcucuuucuaucauuuccauucugguggc

SEQ ID NO: 424183 - RNA, 32 nt, Homo Sapiens
cauuuaccaaaauaggccaaucucagaacuaa

SEQ ID NO: 424184 - RNA, 32 nt, Homo Sapiens
uuaacaauugguuaugguuccuuguuuuaauu

SEQ ID NO: 424185 - RNA, 32 nt, Homo Sapiens
cggagggucccaggcuugaggacccgucggcc

SEQ ID NO: 424186 - RNA, 32 nt, Homo Sapiens
cucagucuuuccuggagacagcaagaagcugc

SEQ ID NO: 424187 - RNA, 32 nt, Homo Sapiens
caccugcccgcgccuggcgggcuucuucccuc

SEQ ID NO: 424188 - RNA, 32 nt, Homo Sapiens
gcccauccuguuuuuuaaaguuucaccuguga

SEQ ID NO: 424189 - RNA, 32 nt, Homo Sapiens
ggggcccugcggugaacacuggucaagcucuc

SEQ ID NO: 424190 - RNA, 29 nt, Homo Sapiens
aauuggguauguaugugaauggguguaca

SEQ ID NO: 424191 - RNA, 32 nt, Homo Sapiens
caauggauaauuaguccuaacuguauugcugg

SEQ ID NO: 424192 - RNA, 32 nt, Homo Sapiens
ccuuucgcagcccuuccauuugucacuagaua

SEQ ID NO: 424193 - RNA, 32 nt, Homo Sapiens
ggauggaaagcgcgacugcugcuuugaaaaca

SEQ ID NO: 424194 - RNA, 32 nt, Homo Sapiens
agguugggagggaaagaaaguaguuuucagag

SEQ ID NO: 424195 - RNA, 32 nt, Homo Sapiens
gccauccuaccuugcuuggaagaguuuguuuc

SEQ ID NO: 424196 - RNA, 29 nt, Homo Sapiens
ugaagguggggacagugaccgcggacccc

SEQ ID NO: 424197 - RNA, 32 nt, Homo Sapiens
uauuugguacuauuagaggaaaaacuuuggau

SEQ ID NO: 424198 - RNA, 32 nt, Homo Sapiens
uugugaaagaaaugaaccuagauucuuaagca

SEQ ID NO: 424199 - RNA, 32 nt, Homo Sapiens
aacagaaaggucgggguagguucgugcagaga

SEQ ID NO: 424200 - RNA, 32 nt, Homo Sapiens
ggcuagagcccucuccgcacagcguggagacg

SEQ ID NO: 424201 - RNA, 32 nt, Homo Sapiens
cuagcggagccagcgcagccugcccggcucag

SEQ ID NO: 424202 - RNA, 32 nt, Homo Sapiens
agcccuuccuccgugcgcccugccgggcggcg

SEQ ID NO: 424203 - RNA, 32 nt, Homo Sapiens
aaaccuagauguuuaacuuaguguuuucaaga

SEQ ID NO: 424204 - RNA, 32 nt, Homo Sapiens
gggagcauuuuacauuauucuuggaugaugau

SEQ ID NO: 424205 - RNA, 32 nt, Homo Sapiens
aacgaugcaauaaaaccagagaagauccagcu

SEQ ID NO: 424206 - RNA, 32 nt, Homo Sapiens
ggggcagacaccaagagaagggcgcguccccg

SEQ ID NO: 424207 - RNA, 32 nt, Homo Sapiens
ggccaggacagccggggcugggugcugcaggg

SEQ ID NO: 424208 - RNA, 32 nt, Homo Sapiens
ugugcuaggucugaccaaaaccagagggcagu

SEQ ID NO: 424209 - RNA, 32 nt, Homo Sapiens
ccuccggaaaguguaguccugcccuaacccaa

SEQ ID NO: 424210 - RNA, 32 nt, Homo Sapiens
acguagagagccagcaaagggaucaugaccaa

SEQ ID NO: 424211 - RNA, 32 nt, Homo Sapiens
aaaucguaaaggaaacagaaagaugaaauaag

SEQ ID NO: 424212 - RNA, 32 nt, Homo Sapiens
accggguguagagggcggucgcggcgggcagu

SEQ ID NO: 424213 - RNA, 32 nt, Homo Sapiens
aauguuauuuugcaaaugccauauauucaaaa

SEQ ID NO: 424214 - RNA, 32 nt, Homo Sapiens
uucaaaauccgaaaucauuugcgagccgcaau

SEQ ID NO: 424215 - RNA, 32 nt, Homo Sapiens
accccuucaaggaauuuacagccuccagacag

SEQ ID NO: 424216 - RNA, 32 nt, Homo Sapiens
uugcauucuuaauaaacuuaauugcagacugc

SEQ ID NO: 424217 - RNA, 32 nt, Homo Sapiens
aaagccacauauauucacuuuuauugcccuaa

SEQ ID NO: 424218 - RNA, 32 nt, Homo Sapiens
uuuuaaaaacaaaaacauaauaaugguuacaa

SEQ ID NO: 424219 - RNA, 32 nt, Homo Sapiens
cacaaaggcagcuuugugagcagagcuccuuc

SEQ ID NO: 424220 - RNA, 32 nt, Homo Sapiens
ccugcugaaaaauguuaauccaaauacacauu

SEQ ID NO: 424221 - RNA, 32 nt, Homo Sapiens
ucuucccagcacuucccugccucccccaggcc

SEQ ID NO: 424222 - RNA, 32 nt, Homo Sapiens
uuccaaaacccagggagcaaccacuggcccua

SEQ ID NO: 424223 - RNA, 32 nt, Homo Sapiens
ccugaggggcggggcguguagccagccaggug

SEQ ID NO: 424224 - RNA, 32 nt, Homo Sapiens
gauuaaguucauuucucuuuuacacuuuugua

SEQ ID NO: 424225 - RNA, 28 nt, Homo Sapiens
cacagaguuacagggcagugcuucaugu

SEQ ID NO: 424226 - RNA, 32 nt, Homo Sapiens
uggccuugugcgguuguguucucauuuuuauc

SEQ ID NO: 424227 - RNA, 32 nt, Homo Sapiens
cagcugagcaagacuagaagcuggucauuggg

SEQ ID NO: 424228 - RNA, 32 nt, Homo Sapiens
gagguggagcagcuccuccgggaccucgggau

SEQ ID NO: 424229 - RNA, 32 nt, Homo Sapiens
ucugucgcccuucucccggcccucgcuaagcc

SEQ ID NO: 424230 - RNA, 32 nt, Homo Sapiens
gcaggaggcgcuucggcccaugccgaacaucc

SEQ ID NO: 424231 - RNA, 32 nt, Homo Sapiens
gucaaagccaaggguggcguuuugggggcgcu

SEQ ID NO: 424232 - RNA, 32 nt, Homo Sapiens
agcugaagcggcggagcgcgccgccagccagc

SEQ ID NO: 424233 - RNA, 31 nt, Homo Sapiens
auuggaauggugcuuuggaucuuauggaggc

SEQ ID NO: 424234 - RNA, 32 nt, Homo Sapiens
cuuucucccuacugccuuuucagacuuggagc

SEQ ID NO: 424235 - RNA, 32 nt, Homo Sapiens
ggaucuagaagaaggaagaaaguguguaaaua

SEQ ID NO: 424236 - RNA, 32 nt, Homo Sapiens
ccagcgcgagagacccugccccgcccccuucc

SEQ ID NO: 424237 - RNA, 32 nt, Homo Sapiens
gagugcucagaauaaugcuugaacaccucacc

SEQ ID NO: 424238 - RNA, 32 nt, Homo Sapiens
ggcaaagagaaccugggcugagacauggccgc

SEQ ID NO: 424239 - RNA, 32 nt, Homo Sapiens
gagugggcaccagugcggccccgguggccaug

SEQ ID NO: 424240 - RNA, 32 nt, Homo Sapiens
cugcccagaccccacaccccuaggucuccucu

SEQ ID NO: 424241 - RNA, 32 nt, Homo Sapiens
cccucuccacacugcaggccacggugcucuac

SEQ ID NO: 424242 - RNA, 32 nt, Homo Sapiens
guucaggacuuccaaagaagguucaucuuccc

SEQ ID NO: 424243 - RNA, 32 nt, Homo Sapiens
gcgccgcucccucguccugcccugcgggcuca

SEQ ID NO: 424244 - RNA, 32 nt, Homo Sapiens
ucucugccuccagccccaccuuccccgggaga

SEQ ID NO: 424245 - RNA, 32 nt, Homo Sapiens
gcucagugggagaggggaaccaggcccucuuc

SEQ ID NO: 424246 - RNA, 32 nt, Homo Sapiens
aguuucuaucauaaauuuuaaauguaagauug

SEQ ID NO: 424247 - RNA, 32 nt, Homo Sapiens
gguugggaccuggugccugugccgcccuggcu

SEQ ID NO: 424248 - RNA, 32 nt, Homo Sapiens
ggaguuacggguggagggaggacaucagaucu

SEQ ID NO: 424249 - RNA, 32 nt, Homo Sapiens
ccucgcccucggaaaacaaaaccagacaugau

SEQ ID NO: 424250 - RNA, 32 nt, Homo Sapiens
uuacuucuuuccuuuuucuuaaguucggaucc

SEQ ID NO: 424251 - RNA, 32 nt, Homo Sapiens
ucugcagaagaaaagagguuucgaaagaggga

SEQ ID NO: 424252 - RNA, 32 nt, Homo Sapiens
gcgccucugggaacuggaugaguccuucggcg

SEQ ID NO: 424253 - RNA, 32 nt, Homo Sapiens
uucaugauguuaugaggauuguugacaaacau

SEQ ID NO: 424254 - RNA, 30 nt, Homo Sapiens
ccgcauuuuauaugaggggaaacugacggu

SEQ ID NO: 424255 - RNA, 32 nt, Homo Sapiens
accagccugggcaacauagugagacccuguau

SEQ ID NO: 424256 - RNA, 32 nt, Homo Sapiens
uuguggaagaaauuauuugguacauuaauaaa

SEQ ID NO: 424257 - RNA, 32 nt, Homo Sapiens
caggugggcaaagggaggagacguggagaagu

SEQ ID NO: 424258 - RNA, 32 nt, Homo Sapiens
cugcaggcucugcugcuggcucagggcagccg

SEQ ID NO: 424259 - RNA, 32 nt, Homo Sapiens
aacccgguccaguacugggagauacagccauc

SEQ ID NO: 424260 - RNA, 32 nt, Homo Sapiens
uuaauuauaaaauuauuuugaugaauuaugau

SEQ ID NO: 424261 - RNA, 32 nt, Homo Sapiens
gcgccgagcaccgagcgccgccgggagucgag

SEQ ID NO: 424262 - RNA, 32 nt, Homo Sapiens
cuugauuuucuuucuuuuuucuuuuuuuuucu

SEQ ID NO: 424263 - RNA, 32 nt, Homo Sapiens
gcaaaagcugcuccgagaggagaaggucaagu

SEQ ID NO: 424264 - RNA, 32 nt, Homo Sapiens
ucuuuggcucugccuuugucuguccugugaga

SEQ ID NO: 424265 - RNA, 32 nt, Homo Sapiens
ggagccaucccaagcaucagugucucagaguc

SEQ ID NO: 424266 - RNA, 32 nt, Homo Sapiens
uugcaaugugucauaaauucucuucuuuuucc

SEQ ID NO: 424267 - RNA, 32 nt, Homo Sapiens
ggaggaccccugccuuccucugaggacaggcu

SEQ ID NO: 424268 - RNA, 32 nt, Homo Sapiens
gcuuuugucucucauagcacagagcaggaggg

SEQ ID NO: 424269 - RNA, 32 nt, Homo Sapiens
cacauuuugugauuuuggguuauuuauuuugu

SEQ ID NO: 424270 - RNA, 32 nt, Homo Sapiens
ggcggggcgagggcgcggcucgaggcaucccu

SEQ ID NO: 424271 - RNA, 32 nt, Homo Sapiens
gacuccagcccgcagcacauuuccgcuguccg

SEQ ID NO: 424272 - RNA, 32 nt, Homo Sapiens
ccccgacccugaugauuuugugccgccugugc

SEQ ID NO: 424273 - RNA, 32 nt, Homo Sapiens
guugaagaucaucaaccauuuuugccucacuu

SEQ ID NO: 424274 - RNA, 32 nt, Homo Sapiens
cuccccagaccuguucccuuucuuugacugac

SEQ ID NO: 424275 - RNA, 32 nt, Homo Sapiens
augaagaagacauaaaauuagggcuuuuguca

SEQ ID NO: 424276 - RNA, 28 nt, Homo Sapiens
gacuagaaaguuuaacauuagaaauaaa

SEQ ID NO: 424277 - RNA, 27 nt, Homo Sapiens
cugcucggucucuucagccucagaugg

SEQ ID NO: 424278 - RNA, 32 nt, Homo Sapiens
uuaucaucauuaccauggagcccaacaguccc

SEQ ID NO: 424279 - RNA, 32 nt, Homo Sapiens
ccccgaucuucacucggauaccucuugauuuc

SEQ ID NO: 424280 - RNA, 32 nt, Homo Sapiens
cacuaaacgagcuuaacuguauauagcaaaac

SEQ ID NO: 424281 - RNA, 32 nt, Homo Sapiens
uggugaguggggggcgggcgccugggggcgac

SEQ ID NO: 424282 - RNA, 32 nt, Homo Sapiens
ggaauauguauaaaucagaacuagcagaagua

SEQ ID NO: 424283 - RNA, 32 nt, Homo Sapiens
uggaggugcagggcacccuugagaagccccuc

SEQ ID NO: 424284 - RNA, 32 nt, Homo Sapiens
uuuaaagacagaggccaagaucaaaguucaug

SEQ ID NO: 424285 - RNA, 30 nt, Homo Sapiens
ugcucagagaagcgugaaguuugcacuaug

SEQ ID NO: 424286 - RNA, 32 nt, Homo Sapiens
aagauuuauagcacacacuauucucaggaauu

SEQ ID NO: 424287 - RNA, 32 nt, Homo Sapiens
uucaucaaguggaagccaacuguccugccugc

SEQ ID NO: 424288 - RNA, 32 nt, Homo Sapiens
aauuuuggaaugaggcagaaaaguauaucaag

SEQ ID NO: 424289 - RNA, 32 nt, Homo Sapiens
gaccucccagggugggggccaccgcuuggcac

SEQ ID NO: 424290 - RNA, 32 nt, Homo Sapiens
aaagugauccugaggauuacagcuguggaauu

SEQ ID NO: 424291 - RNA, 32 nt, Homo Sapiens
uggaccccgcggcauccccggcuccccgcccu

SEQ ID NO: 424292 - RNA, 32 nt, Homo Sapiens
augagaggcacagcugaguccggagcagacug

SEQ ID NO: 424293 - RNA, 32 nt, Homo Sapiens
cgaaugcuggccgcuuccugugggcuucgugu

SEQ ID NO: 424294 - RNA, 32 nt, Homo Sapiens
cuaacugguggcccuccuccccaucucaguuu

SEQ ID NO: 424295 - RNA, 32 nt, Homo Sapiens
uauuucaaauuguaccuuugugagauuguaug

SEQ ID NO: 424296 - RNA, 32 nt, Homo Sapiens
acuucacuuuuguaacgggauuuuuauuuuug

SEQ ID NO: 424297 - RNA, 32 nt, Homo Sapiens
cacuucccaugcaguuuccccaggcaccuuug

SEQ ID NO: 424298 - RNA, 32 nt, Homo Sapiens
cucgcgggccgcgggccgcaugacuccucucu

SEQ ID NO: 424299 - RNA, 32 nt, Homo Sapiens
gcgugagggggaugcggcaggaggcggcgcgg

SEQ ID NO: 424300 - RNA, 32 nt, Homo Sapiens
uugccuggcugguugacagacccggggugcuc

SEQ ID NO: 424301 - RNA, 32 nt, Homo Sapiens
acuaguaucaaggaaucccggcguggacagcg

SEQ ID NO: 424302 - RNA, 32 nt, Homo Sapiens
ggacucagcacacuccugggaaucuuguauga

SEQ ID NO: 424303 - RNA, 31 nt, Homo Sapiens
gaguugcaagaggucuuggaaccuguagucc

SEQ ID NO: 424304 - RNA, 29 nt, Homo Sapiens
cugacccaaccacagaggaugcugacauc

SEQ ID NO: 424305 - RNA, 31 nt, Homo Sapiens
ccuccccagcgcaggugugcgugggcagccc

SEQ ID NO: 424306 - RNA, 32 nt, Homo Sapiens
aggucagugucuggaguuucauuccaucccag

SEQ ID NO: 424307 - RNA, 32 nt, Homo Sapiens
cgccgccggaccgcugagacucggggcacggu

SEQ ID NO: 424308 - RNA, 32 nt, Homo Sapiens
auuuuauccaugaaaaugacuuccagaaaagg

SEQ ID NO: 424309 - RNA, 32 nt, Homo Sapiens
ucaaauacaaaaauaaaaugguagagagugaa

SEQ ID NO: 424310 - RNA, 32 nt, Homo Sapiens
auuccaaggagccuaccugaggucccuacucu

SEQ ID NO: 424311 - RNA, 32 nt, Homo Sapiens
uuauugugucacuucugaaguuucacagaaau

SEQ ID NO: 424312 - RNA, 32 nt, Homo Sapiens
aacuguuuuggaaauagcuuugugaaaagagg

SEQ ID NO: 424313 - RNA, 32 nt, Homo Sapiens
caaagaaguauuucugaucaucucucacaaaa

SEQ ID NO: 424314 - RNA, 32 nt, Homo Sapiens
accaaaaugaauugcaaguugccacaaccuau

SEQ ID NO: 424315 - RNA, 32 nt, Homo Sapiens
gcucuaugugcugcuguagugaaaccggaugu

SEQ ID NO: 424316 - RNA, 32 nt, Homo Sapiens
uagacagauccucaguuggguuuucuagcuac

SEQ ID NO: 424317 - RNA, 32 nt, Homo Sapiens
ucccuaguguuccuccccgauuuuuucagaaa

SEQ ID NO: 424318 - RNA, 30 nt, Homo Sapiens
acagcaucacuugccccaucauugugccuu

SEQ ID NO: 424319 - RNA, 32 nt, Homo Sapiens
cauuccuuccccagccccuggcccagggucaa

SEQ ID NO: 424320 - RNA, 32 nt, Homo Sapiens
cugcccccuggggacucuacccugcccgccuc

SEQ ID NO: 424321 - RNA, 32 nt, Homo Sapiens
uccgaucaaagccggccgugcugcuggccggg

SEQ ID NO: 424322 - RNA, 32 nt, Homo Sapiens
gugcauguaauuuugaaauagcacacauuuuc

SEQ ID NO: 424323 - RNA, 32 nt, Homo Sapiens
agugcugggaagggcugagcucacccaggcca

SEQ ID NO: 424324 - RNA, 32 nt, Homo Sapiens
gucuggaaguuuggguucugguccuggcugug

SEQ ID NO: 424325 - RNA, 32 nt, Homo Sapiens
ucccugcucauucugcuucugcugcugaucaa

SEQ ID NO: 424326 - RNA, 32 nt, Homo Sapiens
cuccccgcggggcgcgcagcucgcgggucuuu

SEQ ID NO: 424327 - RNA, 30 nt, Homo Sapiens
aacccacugccuagaggccaucuuaaagga

SEQ ID NO: 424328 - RNA, 32 nt, Homo Sapiens
cucagcuccuucccugucuccuccuaauccaa

SEQ ID NO: 424329 - RNA, 32 nt, Homo Sapiens
ggaggggagagccuggccagggcugguguugg

SEQ ID NO: 424330 - RNA, 32 nt, Homo Sapiens
gcgccgcccccaggcccacccggagcaugcug

SEQ ID NO: 424331 - RNA, 32 nt, Homo Sapiens
cgguuuucucuuuuuucuuuuuuuuuuuacaa

SEQ ID NO: 424332 - RNA, 32 nt, Homo Sapiens
gggccuggcucacccucucuggaccugucugc

SEQ ID NO: 424333 - RNA, 32 nt, Homo Sapiens
gcaaaucuguagauucucuccucucccauccc

SEQ ID NO: 424334 - RNA, 32 nt, Homo Sapiens
uuaguucuaaaaucuuauuccuccucuucucc

SEQ ID NO: 424335 - RNA, 32 nt, Homo Sapiens
uucucaguucccuccagaaaaccuacuggggc

SEQ ID NO: 424336 - RNA, 32 nt, Homo Sapiens
cccugucacaaugaccuccccaucccacuuca

SEQ ID NO: 424337 - RNA, 32 nt, Homo Sapiens
aauaauugugagucagcguaacauuucaagag

SEQ ID NO: 424338 - RNA, 32 nt, Homo Sapiens
uugucuuuaaguguaaauauuuuaaaauuuga

SEQ ID NO: 424339 - RNA, 32 nt, Homo Sapiens
aacgugcccugagcccucuccuccaagagguc

SEQ ID NO: 424340 - RNA, 32 nt, Homo Sapiens
agagcccauguuuccugacauagcucuacacc

SEQ ID NO: 424341 - RNA, 29 nt, Homo Sapiens
cagcucugauguggaugaaagcugaucca

SEQ ID NO: 424342 - RNA, 32 nt, Homo Sapiens
aaauuggaauuugaacaacaauguaaaaccug

SEQ ID NO: 424343 - RNA, 32 nt, Homo Sapiens
cacgcucugcucuggugucuugggaguugugc

SEQ ID NO: 424344 - RNA, 32 nt, Homo Sapiens
acacacacaaaauuugucauagguucccaguu

SEQ ID NO: 424345 - RNA, 32 nt, Homo Sapiens
gcaaagcaaauaggauuuucaauauaaauauc

SEQ ID NO: 424346 - RNA, 32 nt, Homo Sapiens
gaccucucaguccccuggcccggccagccacc

SEQ ID NO: 424347 - RNA, 32 nt, Homo Sapiens
uuucuccccuccccacagaucccaucucaaau

SEQ ID NO: 424348 - RNA, 32 nt, Homo Sapiens
agaaccagcgccccgaugccugaggcugggag

SEQ ID NO: 424349 - RNA, 32 nt, Homo Sapiens
uggagucugcgucugcccuuucccuucuccca

SEQ ID NO: 424350 - RNA, 32 nt, Homo Sapiens
cugugccccuccccuccaggcuaccucugcac

SEQ ID NO: 424351 - RNA, 27 nt, Homo Sapiens
cuccucaccugucucagccccucuaga

SEQ ID NO: 424352 - RNA, 32 nt, Homo Sapiens
cugggucuuuugcggcugcagcgggcuuguag

SEQ ID NO: 424353 - RNA, 32 nt, Homo Sapiens
gauuugaacuggaagcuuaugugguuugagga

SEQ ID NO: 424354 - RNA, 32 nt, Homo Sapiens
acacugggugggcaccugucuugugaguggcu

SEQ ID NO: 424355 - RNA, 32 nt, Homo Sapiens
caguggcacgggggcgugaggaagagggaaag

SEQ ID NO: 424356 - RNA, 32 nt, Homo Sapiens
cauguuuuccaagagaaaagccuguguuuuca

SEQ ID NO: 424357 - RNA, 32 nt, Homo Sapiens
ucauaugugaaggcacguucuccagccaucag

SEQ ID NO: 424358 - RNA, 32 nt, Homo Sapiens
agaaaucuuauuucuuuuuuuggaggcuuccu

SEQ ID NO: 424359 - RNA, 32 nt, Homo Sapiens
acacaggucccggccccugcccgggcuggagu

SEQ ID NO: 424360 - RNA, 32 nt, Homo Sapiens
cccugaaggacccaggauuugcugggagaggg

SEQ ID NO: 424361 - RNA, 32 nt, Homo Sapiens
ccccccuccccgcucccucccucucucaaggu

SEQ ID NO: 424362 - RNA, 32 nt, Homo Sapiens
ucccuggauucuggcaaaucuccgucuaguaa

SEQ ID NO: 424363 - RNA, 30 nt, Homo Sapiens
cuggccacaugcauagcccaucuucauaau

SEQ ID NO: 424364 - RNA, 32 nt, Homo Sapiens
guaaagcagacuuauaaaauuauagcuaugug

SEQ ID NO: 424365 - RNA, 32 nt, Homo Sapiens
uuuguuuucuuguucgggagaauggggccggg

SEQ ID NO: 424366 - RNA, 32 nt, Homo Sapiens
cccgugggucaguuacccuuuauguaaaagcu

SEQ ID NO: 424367 - RNA, 30 nt, Homo Sapiens
agaagaugcacuauuauagauacucuaacg

SEQ ID NO: 424368 - RNA, 32 nt, Homo Sapiens
agcccgcagucuuuuucucugucccuuuaucu

SEQ ID NO: 424369 - RNA, 32 nt, Homo Sapiens
aaggagucaggaauggcuuuuacucaguugac

SEQ ID NO: 424370 - RNA, 32 nt, Homo Sapiens
ggugauuggcugcugcagcccacccccuagcc

SEQ ID NO: 424371 - RNA, 32 nt, Homo Sapiens
gggcuuuucucuuuccucuucuccuaaccagu

SEQ ID NO: 424372 - RNA, 32 nt, Homo Sapiens
agcugcuaccguggcggcggcgcugugaggag

SEQ ID NO: 424373 - RNA, 32 nt, Homo Sapiens
ggagaggaaaggagccacaggagcgggugcua

SEQ ID NO: 424374 - RNA, 32 nt, Homo Sapiens
caggucugcucccgacgggccucgggccugac

SEQ ID NO: 424375 - RNA, 32 nt, Homo Sapiens
uguuauuuuuaguggauguuuaugcuguuuga

SEQ ID NO: 424376 - RNA, 31 nt, Homo Sapiens
uaggaguuugguaauuagauuaucucuuuug

SEQ ID NO: 424377 - RNA, 32 nt, Homo Sapiens
ggccggcaugaugugccuggaaugcgccucgg

SEQ ID NO: 424378 - RNA, 32 nt, Homo Sapiens
cggacgccgggcggccaggagggguugggcuc

SEQ ID NO: 424379 - RNA, 32 nt, Homo Sapiens
ggggaccaaaggaaacagagccagagcagcca

SEQ ID NO: 424380 - RNA, 32 nt, Homo Sapiens
uguaaaucuauuuuuaguguuuguucguuuuu

SEQ ID NO: 424381 - RNA, 32 nt, Homo Sapiens
cucacuccacuacuccauucugugacauaagc

SEQ ID NO: 424382 - RNA, 32 nt, Homo Sapiens
caugugucgucaucuaugcauuagaguugaug

SEQ ID NO: 424383 - RNA, 32 nt, Homo Sapiens
acuuaccuuuggugcccggcccucuggccgcu

SEQ ID NO: 424384 - RNA, 32 nt, Homo Sapiens
uaaccuuccagaaagaaaauuuaaacauuuca

SEQ ID NO: 424385 - RNA, 32 nt, Homo Sapiens
gucgucccaggcugccggcuccccucgacagc

SEQ ID NO: 424386 - RNA, 32 nt, Homo Sapiens
ccccgagcacgcguggccaugcguccccugcg

SEQ ID NO: 424387 - RNA, 32 nt, Homo Sapiens
ggauaccuucaguuugaaucugcauaauguuc

SEQ ID NO: 424388 - RNA, 32 nt, Homo Sapiens
aggucuugggaugcuguugcaagaugguucug

SEQ ID NO: 424389 - RNA, 32 nt, Homo Sapiens
ucccagccuugagcgcacgcacacaccacaca

SEQ ID NO: 424390 - RNA, 32 nt, Homo Sapiens
guuacaaaagaaaaaagcaaguacaaguucca

SEQ ID NO: 424391 - RNA, 32 nt, Homo Sapiens
auuaaaucuugucugauaucugcacaaacaga

SEQ ID NO: 424392 - RNA, 32 nt, Homo Sapiens
gugucagaauauuugcauaaaauuauuuuuca

SEQ ID NO: 424393 - RNA, 32 nt, Homo Sapiens
ucuuaucuuuacacucuaaagcauuuugaaac

SEQ ID NO: 424394 - RNA, 32 nt, Homo Sapiens
ucugaccugggugcaucuccaucacuccuuag

SEQ ID NO: 424395 - RNA, 32 nt, Homo Sapiens
augggagaggagcaccuccacccccaaaucug

SEQ ID NO: 424396 - RNA, 32 nt, Homo Sapiens
ucaacuuuagaggagggaaagggguggcucug

SEQ ID NO: 424397 - RNA, 32 nt, Homo Sapiens
gggacgcggcgguggaggcgguugcuacccac

SEQ ID NO: 424398 - RNA, 32 nt, Homo Sapiens
ucaucagaaaaauuauuuuuuagccauuuuuu

SEQ ID NO: 424399 - RNA, 32 nt, Homo Sapiens
uuccucuggcagacaugcugcacgucuguacc

SEQ ID NO: 424400 - RNA, 32 nt, Homo Sapiens
ucccagcagggcaagggggcgcggcguccugg

SEQ ID NO: 424401 - RNA, 32 nt, Homo Sapiens
gacacgcggcgguguccuguguuggccauggc

SEQ ID NO: 424402 - RNA, 32 nt, Homo Sapiens
cugggcuaugcaaugaggugggcgaggcuuuc

SEQ ID NO: 424403 - RNA, 32 nt, Homo Sapiens
aacugucuugucagacuggcaaauuauauugg

SEQ ID NO: 424404 - RNA, 32 nt, Homo Sapiens
cggcuuucugugccgccucccacacaaaucag

SEQ ID NO: 424405 - RNA, 32 nt, Homo Sapiens
gggugaaauggcaauuauucucuccaugcugg

SEQ ID NO: 424406 - RNA, 32 nt, Homo Sapiens
agacaccaggccagcucucucuuaucugacuu

SEQ ID NO: 424407 - RNA, 32 nt, Homo Sapiens
aaauguguacuauuaucugaggaaguuuuuua

SEQ ID NO: 424408 - RNA, 32 nt, Homo Sapiens
cgacacgcccccagcccacuccgccgcgggac

SEQ ID NO: 424409 - RNA, 31 nt, Homo Sapiens
guuugggugugagauuucagagccccaggua

SEQ ID NO: 424410 - RNA, 32 nt, Homo Sapiens
ugcccaccaaaauaaucuuuauguuaccaagu

SEQ ID NO: 424411 - RNA, 30 nt, Homo Sapiens
gugcggggccugcucccgccggcaccaugg

SEQ ID NO: 424412 - RNA, 32 nt, Homo Sapiens
uauucacuaaaauaaaauuuaaaaaacuccug

SEQ ID NO: 424413 - RNA, 32 nt, Homo Sapiens
ggaggggcuccuugggggaggggaugaccuau

SEQ ID NO: 424414 - RNA, 32 nt, Homo Sapiens
ccucuuugaccaccugugaacucuguugggug

SEQ ID NO: 424415 - RNA, 32 nt, Homo Sapiens
auuucaaauuaugggugaaaugucccaacugc

SEQ ID NO: 424416 - RNA, 32 nt, Homo Sapiens
uuaauaguaaaauaauccaauauagcacuuuu

SEQ ID NO: 424417 - RNA, 32 nt, Homo Sapiens
cgccccgcgcccucgagcgccauggccaagga

SEQ ID NO: 424418 - RNA, 32 nt, Homo Sapiens
aaagacauacccaagacugaguaauuuauaaa

SEQ ID NO: 424419 - RNA, 32 nt, Homo Sapiens
uuuaggucaauacauauagaucuacaucauua

SEQ ID NO: 424420 - RNA, 32 nt, Homo Sapiens
agaugggugggggcuccugguggccuucugcu

SEQ ID NO: 424421 - RNA, 32 nt, Homo Sapiens
uuccugggagaugcuacgguguuauuuuugca

SEQ ID NO: 424422 - RNA, 32 nt, Homo Sapiens
cuccuuggcauucaugggggagcccaggaacc

SEQ ID NO: 424423 - RNA, 32 nt, Homo Sapiens
acuccuggccuaugccagcauucuuuaaaguu

SEQ ID NO: 424424 - RNA, 32 nt, Homo Sapiens
uauuuauuuugucuuuuuuuuaagucucuuuc

SEQ ID NO: 424425 - RNA, 32 nt, Homo Sapiens
ggcccagcgcgcccaccugaggaggcggcggg

SEQ ID NO: 424426 - RNA, 30 nt, Homo Sapiens
guagguacuuguugcaugcaaaagcuguag

SEQ ID NO: 424427 - RNA, 32 nt, Homo Sapiens
gaauugccaagaccugcagguaccucaauguu

SEQ ID NO: 424428 - RNA, 32 nt, Homo Sapiens
aaaauacaaaaauuagcuggacaugguggugc

SEQ ID NO: 424429 - RNA, 32 nt, Homo Sapiens
ugucaccagucuugcccucccagcucaaaccc

SEQ ID NO: 424430 - RNA, 32 nt, Homo Sapiens
guugaaugcaguuuuucuagauuguaaauuaa

SEQ ID NO: 424431 - RNA, 32 nt, Homo Sapiens
gaccaggauacuuguucaggguugccaugcug

SEQ ID NO: 424432 - RNA, 30 nt, Homo Sapiens
ggggggucggcgcgcgugucuacgcggacg

SEQ ID NO: 424433 - RNA, 32 nt, Homo Sapiens
cugauccacagaguuucauauuugaagucucc

SEQ ID NO: 424434 - RNA, 32 nt, Homo Sapiens
cuugauuguacaaaauacguuuuguaaauguu

SEQ ID NO: 424435 - RNA, 32 nt, Homo Sapiens
gccacccccuccccgcagcccucaccccgcca

SEQ ID NO: 424436 - RNA, 32 nt, Homo Sapiens
uugaggucuuugcuuaaguaugagauacuuga

SEQ ID NO: 424437 - RNA, 32 nt, Homo Sapiens
cucugaugugcccccggcucaaggcugagcau

SEQ ID NO: 424438 - RNA, 32 nt, Homo Sapiens
ggaaaagaugcuugugcccagccccguuuuaa

SEQ ID NO: 424439 - RNA, 32 nt, Homo Sapiens
cgccuauacacccagcacuuuggaaggcugag

SEQ ID NO: 424440 - RNA, 32 nt, Homo Sapiens
ugugaaccaacccccaucucccuagcccaccc

SEQ ID NO: 424441 - RNA, 32 nt, Homo Sapiens
uauacugugguuuguuuuccuguccccacauc

SEQ ID NO: 424442 - RNA, 32 nt, Homo Sapiens
ccuuauguagcauuaccuaagaaugcuaccau

SEQ ID NO: 424443 - RNA, 32 nt, Homo Sapiens
ggaaaacugugccccaggaugucuggcccagg

SEQ ID NO: 424444 - RNA, 32 nt, Homo Sapiens
gaccaaaccccgcugcucuucagacaccuugu

SEQ ID NO: 424445 - RNA, 32 nt, Homo Sapiens
uuuuggaagggagaggagguguaagaugguca

SEQ ID NO: 424446 - RNA, 32 nt, Homo Sapiens
aauuuguuagaauucuaacacacuauauacuu

SEQ ID NO: 424447 - RNA, 32 nt, Homo Sapiens
aggccagacauacuagugagccaggcacaucu

SEQ ID NO: 424448 - RNA, 32 nt, Homo Sapiens
cgggacuggugcccauggcugggggugcugag

SEQ ID NO: 424449 - RNA, 32 nt, Homo Sapiens
acugggaaaaaauuacuucaaguaacaugcuu

SEQ ID NO: 424450 - RNA, 32 nt, Homo Sapiens
cauuaugugguuuuagauuuucugguucuaac

SEQ ID NO: 424451 - RNA, 32 nt, Homo Sapiens
uguaaaguuacauuuuaaaauaaacaaaaaac

SEQ ID NO: 424452 - RNA, 32 nt, Homo Sapiens
uucaucauuuugaaggaauaauuauauuguuc

SEQ ID NO: 424453 - RNA, 32 nt, Homo Sapiens
ucguugggagcacgcuccuucugccugauugu

SEQ ID NO: 424454 - RNA, 32 nt, Homo Sapiens
ccacaccuggccccauuuuuuauuuauuacaa

SEQ ID NO: 424455 - RNA, 32 nt, Homo Sapiens
ccgugcacaacaccaagcgcaugguggggucc

SEQ ID NO: 424456 - RNA, 32 nt, Homo Sapiens
cuuaaauuuacuacuacauuaggguaccacau

SEQ ID NO: 424457 - RNA, 32 nt, Homo Sapiens
gaaaaaauggauaaaaauguugaaagaaccuc

SEQ ID NO: 424458 - RNA, 32 nt, Homo Sapiens
auugguaacugguauuuuaacucucaauuuag

SEQ ID NO: 424459 - RNA, 32 nt, Homo Sapiens
uacauaaaacaaaauccaguuuuauaauuccc

SEQ ID NO: 424460 - RNA, 32 nt, Homo Sapiens
gggaaaugggagcacaguacugggaaaugggg

SEQ ID NO: 424461 - RNA, 32 nt, Homo Sapiens
ugcucaugccaagcugggcagcucuccugcac

SEQ ID NO: 424462 - RNA, 32 nt, Homo Sapiens
uuucagugaagaagaaaguaaaguuggaaguu

SEQ ID NO: 424463 - RNA, 32 nt, Homo Sapiens
ugaaguaaacacaguugaugaaucauuccaua

SEQ ID NO: 424464 - RNA, 32 nt, Homo Sapiens
cccagcgggaggaggcgcggcuggagcagagc

SEQ ID NO: 424465 - RNA, 32 nt, Homo Sapiens
uggggauacauucuuagaaaugugucacuagg

SEQ ID NO: 424466 - RNA, 32 nt, Homo Sapiens
gaauuugugacagcugcaguugcuccccgccc

SEQ ID NO: 424467 - RNA, 32 nt, Homo Sapiens
cugaauucuuugauguaccaauguauagaaaa

SEQ ID NO: 424468 - RNA, 32 nt, Homo Sapiens
ugcagcucacuguguccagcugggcccagcac

SEQ ID NO: 424469 - RNA, 32 nt, Homo Sapiens
caccugccaggccugcguggccuuagguuguu

SEQ ID NO: 424470 - RNA, 32 nt, Homo Sapiens
uaagcaaaaccuccucccccagccccggcuca

SEQ ID NO: 424471 - RNA, 32 nt, Homo Sapiens
guaagcacucaauaaugacgacgguuacuaag

SEQ ID NO: 424472 - RNA, 32 nt, Homo Sapiens
guaagccaucacacagaagagggcugugguga

SEQ ID NO: 424473 - RNA, 32 nt, Homo Sapiens
ugccugggcagacaaugcaaugaucuggcaaa

SEQ ID NO: 424474 - RNA, 32 nt, Homo Sapiens
gguuugauauuguagauuugugaugcuuuucu

SEQ ID NO: 424475 - RNA, 32 nt, Homo Sapiens
uucaauugccuuguguaaccacuugucgccuu

SEQ ID NO: 424476 - RNA, 32 nt, Homo Sapiens
gccgcuggagcgcccacccuggccuagucgcc

SEQ ID NO: 424477 - RNA, 32 nt, Homo Sapiens
guccucccauccccucaacacccugcuucucc

SEQ ID NO: 424478 - RNA, 32 nt, Homo Sapiens
auugcugcgcgugugccuccagugccaugggg

SEQ ID NO: 424479 - RNA, 32 nt, Homo Sapiens
acguucacagcauggacggucagugugaagau

SEQ ID NO: 424480 - RNA, 32 nt, Homo Sapiens
aguguuuugccagcuacguccugguauuucua

SEQ ID NO: 424481 - RNA, 31 nt, Homo Sapiens
acucaggaauaaaaaacuaaauaccauaugu

SEQ ID NO: 424482 - RNA, 32 nt, Homo Sapiens
aauucccuuucuuugcauccacaauguggggu

SEQ ID NO: 424483 - RNA, 31 nt, Homo Sapiens
ugcagcacgugcugaucuccaagggugaggc

SEQ ID NO: 424484 - RNA, 32 nt, Homo Sapiens
gguuaguaaauauacauaggcugguggaugag

SEQ ID NO: 424485 - RNA, 32 nt, Homo Sapiens
gacugagaagagaaaaacaaaaauaaaucaua

SEQ ID NO: 424486 - RNA, 32 nt, Homo Sapiens
agugaagaacagacuucacugucugagauuuc

SEQ ID NO: 424487 - RNA, 32 nt, Homo Sapiens
ugaguguuccaggagcucuuugguuuggcuuc

SEQ ID NO: 424488 - RNA, 32 nt, Homo Sapiens
auuaaaguuuacuucccucuaagcaaauaugc

SEQ ID NO: 424489 - RNA, 32 nt, Homo Sapiens
acgcguuuuagaagagcagcuuguuaaggcca

SEQ ID NO: 424490 - RNA, 32 nt, Homo Sapiens
cacuguguaaacauuuucaguggcgauauauc

SEQ ID NO: 424491 - RNA, 32 nt, Homo Sapiens
aauauaauccuccacuggcaggucaaaaaugu

SEQ ID NO: 424492 - RNA, 32 nt, Homo Sapiens
uaaagggugacucgucccacuuguguucucuc

SEQ ID NO: 424493 - RNA, 32 nt, Homo Sapiens
aaacccuagaacuugaauaggugccuguucuu

SEQ ID NO: 424494 - RNA, 32 nt, Homo Sapiens
gucccuccaggcaccaggaucucaucauuucc

SEQ ID NO: 424495 - RNA, 32 nt, Homo Sapiens
aaagggaaauaucagacaauauuuuauuauuu

SEQ ID NO: 424496 - RNA, 32 nt, Homo Sapiens
gggucggucagcggcccgagcccggcugcggc

SEQ ID NO: 424497 - RNA, 32 nt, Homo Sapiens
uuuaaaguuuauauucgaguuguacaaaguua

SEQ ID NO: 424498 - RNA, 32 nt, Homo Sapiens
gcaaguaaugguuuuuaucuuaacuauaaguu

SEQ ID NO: 424499 - RNA, 32 nt, Homo Sapiens
uuuuuaacuauauaaaaaacaaaaggguggau

SEQ ID NO: 424500 - RNA, 32 nt, Homo Sapiens
cucugacucugcagugccagcuuggacagauu

SEQ ID NO: 424501 - RNA, 32 nt, Homo Sapiens
gagguccuuucuguuuuuuauauguaaacaga

SEQ ID NO: 424502 - RNA, 32 nt, Homo Sapiens
ugcauacacuggccgcgccucagggaucucau

SEQ ID NO: 424503 - RNA, 32 nt, Homo Sapiens
ccugacagaggagaagcagcggcuggagcagc

SEQ ID NO: 424504 - RNA, 32 nt, Homo Sapiens
auuugugauuuucaguaaucugaguuuuugau

SEQ ID NO: 424505 - RNA, 32 nt, Homo Sapiens
ccucauggccccagucuacgagggcuaccggc

SEQ ID NO: 424506 - RNA, 32 nt, Homo Sapiens
aggccacggugucccaggaucgcagagggcug

SEQ ID NO: 424507 - RNA, 31 nt, Homo Sapiens
ccuuagccaaucaccaccucauugggugaaa

SEQ ID NO: 424508 - RNA, 32 nt, Homo Sapiens
auuuucaugugugugaguuugcugguuguaaa

SEQ ID NO: 424509 - RNA, 32 nt, Homo Sapiens
ccguuuuuugugguguacuccgugccaucaug

SEQ ID NO: 424510 - RNA, 32 nt, Homo Sapiens
ggccugucagagaaauucuguguugaaaauaa

SEQ ID NO: 424511 - RNA, 32 nt, Homo Sapiens
aucugagcaaaucuuccucuagcuucaggagg

SEQ ID NO: 424512 - RNA, 32 nt, Homo Sapiens
gagccgagugaccccucccggcgcccgcccca

SEQ ID NO: 424513 - RNA, 32 nt, Homo Sapiens
gccacgucaggagagccagcggugccugucgg

SEQ ID NO: 424514 - RNA, 32 nt, Homo Sapiens
ugccacuucgggcuuucagugcuucucagcuu

SEQ ID NO: 424515 - RNA, 32 nt, Homo Sapiens
uugcaucagaucugaaaugucugagaguaaua

SEQ ID NO: 424516 - RNA, 32 nt, Homo Sapiens
uauuuuuguaaauaguuuagcacuuucuuuuu

SEQ ID NO: 424517 - RNA, 32 nt, Homo Sapiens
ccgucucggccgcggccagcagccccugcccc

SEQ ID NO: 424518 - RNA, 29 nt, Homo Sapiens
ccuguuuggagacagaggaagaaccaggu

SEQ ID NO: 424519 - RNA, 32 nt, Homo Sapiens
uccccugggggagugggucagagguacuggag

SEQ ID NO: 424520 - RNA, 32 nt, Homo Sapiens
gagccugggcccggcccacucagcggcccaca

SEQ ID NO: 424521 - RNA, 29 nt, Homo Sapiens
ucgauguagagacucuauuuucucccaaa

SEQ ID NO: 424522 - RNA, 32 nt, Homo Sapiens
uacagagggcaccugaacacggggcucucaga

SEQ ID NO: 424523 - RNA, 32 nt, Homo Sapiens
gugcggaacugcguuuguuuccggcguggguc

SEQ ID NO: 424524 - RNA, 32 nt, Homo Sapiens
uaacauacuuauuugcagaagugguguaguuc

SEQ ID NO: 424525 - RNA, 32 nt, Homo Sapiens
caauuaaagacauuuaaaauaguuuucuaaau

SEQ ID NO: 424526 - RNA, 32 nt, Homo Sapiens
ugggccugugcagcuucgggggguccugcugg

SEQ ID NO: 424527 - RNA, 32 nt, Homo Sapiens
gagaaugcagcuuuuuugaguugucacagagg

SEQ ID NO: 424528 - RNA, 32 nt, Homo Sapiens
agcaauagcaccguaggcccccugcccucuua

SEQ ID NO: 424529 - RNA, 32 nt, Homo Sapiens
ugcagguggggggacaugguguggcacugggg

SEQ ID NO: 424530 - RNA, 32 nt, Homo Sapiens
acuguacugucaauagauauuuuugagauuua

SEQ ID NO: 424531 - RNA, 32 nt, Homo Sapiens
ccgagcccagccagcccuugaccaagaacaag

SEQ ID NO: 424532 - RNA, 32 nt, Homo Sapiens
ucuuauaaucccaaguuuauuguuguuauggu

SEQ ID NO: 424533 - RNA, 32 nt, Homo Sapiens
cggcggccgggcgggggagauggcggcgcgau

SEQ ID NO: 424534 - RNA, 32 nt, Homo Sapiens
uuuugcaaggccucuuuuuuuuaaugaagaaa

SEQ ID NO: 424535 - RNA, 32 nt, Homo Sapiens
cagcacugacgucuauuuggagcccauggaga

SEQ ID NO: 424536 - RNA, 32 nt, Homo Sapiens
gccagccccagcggucacgcccggcccagccc

SEQ ID NO: 424537 - RNA, 32 nt, Homo Sapiens
uaaaagagaaaguagaaaacuauucuaacaau

SEQ ID NO: 424538 - RNA, 32 nt, Homo Sapiens
auggcacagggaggaggccucagauucacaug

SEQ ID NO: 424539 - RNA, 31 nt, Homo Sapiens
cgccggcugccggcuugccgaagcccccuca

SEQ ID NO: 424540 - RNA, 32 nt, Homo Sapiens
agagucgaugccggcgucugagcugcgcagug

SEQ ID NO: 424541 - RNA, 32 nt, Homo Sapiens
gaagggugguggcgugcauauguaaagcacau

SEQ ID NO: 424542 - RNA, 32 nt, Homo Sapiens
uuauuugcaugauuauaguuaagcaaauuuca

SEQ ID NO: 424543 - RNA, 32 nt, Homo Sapiens
auaugccuccuucuccuucaccuuccaccaug

SEQ ID NO: 424544 - RNA, 32 nt, Homo Sapiens
cagccaggacaucucugcccucuucucauccc

SEQ ID NO: 424545 - RNA, 32 nt, Homo Sapiens
acaaggggacgccacgggccacauguuuagga

SEQ ID NO: 424546 - RNA, 32 nt, Homo Sapiens
ggucuuauaaaauauaauguacuuagagcugg

SEQ ID NO: 424547 - RNA, 32 nt, Homo Sapiens
gaagcggaggcgccggccggucggccgggaua

SEQ ID NO: 424548 - RNA, 32 nt, Homo Sapiens
ggccugucucggggcuggccuggcagcgcugc

SEQ ID NO: 424549 - RNA, 32 nt, Homo Sapiens
ggagucucuggcaagcuccccugacugugcau

SEQ ID NO: 424550 - RNA, 32 nt, Homo Sapiens
gcggccggcggccgaggcgcaggugcgggucg

SEQ ID NO: 424551 - RNA, 32 nt, Homo Sapiens
ggcuucugggcagcugggccugcccggggaag

SEQ ID NO: 424552 - RNA, 32 nt, Homo Sapiens
ggaaaauggagacaggcauauucaugggucau

SEQ ID NO: 424553 - RNA, 32 nt, Homo Sapiens
ggguguucugauguggaaaaaagaaaugcaag

SEQ ID NO: 424554 - RNA, 32 nt, Homo Sapiens
ucgccgaggacgccucccggaggcggcgugcc

SEQ ID NO: 424555 - RNA, 32 nt, Homo Sapiens
caaaaacauuacuguucuaaugcugaagugac

SEQ ID NO: 424556 - RNA, 32 nt, Homo Sapiens
aacuucacucccucacgcuaccccgucccccu

SEQ ID NO: 424557 - RNA, 32 nt, Homo Sapiens
cccaagggcaggggccacucuuagcuaaaucc

SEQ ID NO: 424558 - RNA, 32 nt, Homo Sapiens
aaacagaagaugaaucucugguagaaaauaau

SEQ ID NO: 424559 - RNA, 32 nt, Homo Sapiens
uuauuugugcgaagaaccauuauugaguuugc

SEQ ID NO: 424560 - RNA, 30 nt, Homo Sapiens
cuggggauggacggggcgauaugcauugcc

SEQ ID NO: 424561 - RNA, 32 nt, Homo Sapiens
ccauuauagguaagugagacagcaaauagaug

SEQ ID NO: 424562 - RNA, 32 nt, Homo Sapiens
uuagccuuguucagaauuuacugcacauaaaa

SEQ ID NO: 424563 - RNA, 32 nt, Homo Sapiens
agacagcaaccuccuggguaaaucugaaugaa

SEQ ID NO: 424564 - RNA, 32 nt, Homo Sapiens
gucaugcuggccaauuaaggcaucaucagucc

SEQ ID NO: 424565 - RNA, 32 nt, Homo Sapiens
aggcccgcacccgcccagucccgagggcccgg

SEQ ID NO: 424566 - RNA, 31 nt, Homo Sapiens
uuuuaguguacuagauccagaaacuuagugu

SEQ ID NO: 424567 - RNA, 32 nt, Homo Sapiens
cugccgggcuccccggcacuagcgcugcuggc

SEQ ID NO: 424568 - RNA, 32 nt, Homo Sapiens
auccugcuucugacauugaacucauugaacuc

SEQ ID NO: 424569 - RNA, 32 nt, Homo Sapiens
aaagguuuaguaggguacuuuuuugcauuaau

SEQ ID NO: 424570 - RNA, 32 nt, Homo Sapiens
gagcucuuggcuuccauacgugucucagacag

SEQ ID NO: 424571 - RNA, 32 nt, Homo Sapiens
cccuccagcucuuuguguguggcucucucagg
